(19) United States
(12) Patent Application Publication
(10) Pub. No.: US 2022/0275049 A1
(43) Pub. Date: Sep. 1, 2022

(54) ANTIGENIC POLYPEPTIDES AND METHODS OF USE THEREOF

(71) Applicant: AGENUS INC., Lexington, MA (US)

(72) Inventors: Benjamin Maxime MORIN, Lexington, MA (US); Mark Arthur FINDEIS, Lexington, MA (US); Bishnu JOSHI, Lexington, MA (US)

(21) Appl. No.: 17/582,445

(22) Filed: Jan. 24, 2022

Related U.S. Application Data
(63) Continuation of application No. PCT/US2020/043431, filed on Jul. 24, 2020.
(60) Provisional application No. 62/878,157, filed on Jul. 24, 2019.

(51) Int. Cl. C07K 14/74; A61P 35/02; A61K 45/06

(52) U.S. Cl. CPC C07K 14/70539; A61P 35/02; A61K 45/06; A61K 38/00

(57) ABSTRACT

Provided are novel antigenic polypeptides comprising tumor-associated peptides, and compositions comprising the same. Such antigenic polypeptides and compositions are particularly useful as immunotherapeutics (e.g., cancer vaccines). Also provided are methods of inducing a cellular immune response using such polypeptides and compositions, methods of treating a disease using such polypeptides and compositions, kits comprising such polypeptides and compositions, and methods of making such compositions.

### 1. RELATED APPLICATIONS

[0001] This application is a Continuation Application of International Patent Application No. PCT/US2020/043431, filed Jul. 24, 2020, which claims priority to U.S. Provisional Patent Application Ser. No. 62/878,157, entitled “Antigenic Polypeptides And Methods Of Use Thereof”, filed Jul. 24, 2019. The contents of the aforementioned application is hereby incorporated by reference herein in its entirety.

### 2. SEQUENCE LISTING

[0002] The sequence listing attached herewith, named 404293_AGBW_129US_188615_Sequence_Listing.txt and created on Jul. 24, 2020, is herein incorporated by reference in its entirety.

### 3. FIELD

[0003] The instant disclosure relates to novel antigenic polypeptides and compositions, and uses of such antigenic polypeptides and compositions as immunotherapeutics (e.g., cancer vaccines).

### 4. BACKGROUND

[0004] Immunotherapies are becoming important tools in the treatment of cancer. One immunotherapy approach involves the use of therapeutic cancer vaccines comprising cancer-specific antigenic peptides that actively educate a patient's immune system to target and destroy cancer cells. However, the generation of such therapeutic cancer vaccines is limited by the immunogenicity of cancer-specific antigenic peptides.

[0005] Accordingly, there is a need in the art for improved immunogenic cancer-specific peptides and for creating effective anti-cancer vaccines comprising these peptides.

### 5. SUMMARY OF INVENTION

[0006] The instant disclosure provides novel antigenic polypeptides comprising tumor-associated peptides, and compositions comprising the same. Such antigenic polypeptides and compositions are particularly useful as immunotherapeutics (e.g., cancer vaccines). Also provided are methods of inducing a cellular immune response using such polypeptides and compositions, methods of treating a disease using such polypeptides and compositions, kits comprising such polypeptides and compositions, and methods of making such compositions.

[0007] Accordingly, the instant disclosure provides the following, non-limiting, embodiments:

Embodiment 1. An antigenic polypeptide comprising:
an WIC-binding peptide comprising an amino acid sequence selected from the group consisting of SEQ ID NOs: 98-3000 and 8808; and
an HSP-binding peptide comprising the amino acid sequence of X₁X₂X₃X₄X₅X₆X₇ (SEQ ID NO: 1), wherein X₁ is omitted, N, F, or Q; X₂ is W, L, or F; X₃ is L or I; X₄ is R, L, or K; X₅ is L, W, or I; X₆ is T, L, F, K, R, or W; and X₇ is W, G, K, or F.
Embodiment 2. The antigenic polypeptide of embodiment 1, wherein the amino acid sequence of the WIC-binding peptide consists of an amino acid sequence selected from the group consisting of SEQ ID NOs: 98-3000 and 8808.
Embodiment 3. The antigenic polypeptide of embodiment 1 or 2, wherein the HSP-binding peptide comprises the amino acid sequence of:
(a) X₁LX₂LTX₃ (SEQ ID NO: 2), wherein X₁ is W or F; X₂ is R or K; and X₃ is W, F, or G;
(b) NX₁LX₂LTX₃ (SEQ ID NO: 3), wherein X₁ is W or F; X₂ is R or K; and X₃ is W, F, or G;
(c) WLX₁LTX₂ (SEQ ID NO: 4), wherein X₁ is R or K; and X₂ is W or G;
(d) NWLX₁LTX₂ (SEQ ID NO: 5), wherein X₁ is R or K; and X₂ is W or G; or
(e) NWX₁X₂X₃X₄X₅ (SEQ ID NO: 6), wherein X₁ is L or I; X₂ is L, R, or K; X₃ is L or I; X₄ is T, L, F, K, R, or W; and X₅ is W or K.
Embodiment 4. The antigenic polypeptide of embodiment 1 or 2, wherein the HSP-binding peptide comprises an amino acid sequence selected from the group consisting of SEQ ID NOs: 7-42, optionally wherein the amino acid sequence of the HSP-binding peptide consists of an amino acid sequence selected from the group consisting of SEQ ID NOs: 7-42.
Embodiment 5. The antigenic polypeptide of embodiment 1 or 2, wherein the HSP-binding peptide comprises the amino acid sequence of SEQ ID NO: 7, optionally wherein the amino acid sequence of the HSP-binding peptide consists of the amino acid sequence of SEQ ID NO: 7.
Embodiment 6. The antigenic polypeptide of embodiment 1 or 2, wherein the HSP-binding peptide comprises the amino acid sequence of SEQ ID NO: 8, optionally wherein the amino acid sequence of the HSP-binding peptide consists of the amino acid sequence of SEQ ID NO: 8.
Embodiment 7. The antigenic polypeptide of embodiment 1 or 2, wherein the HSP-binding peptide comprises the amino acid sequence of SEQ ID NO: 9, optionally wherein the amino acid sequence of the HSP-binding peptide consists of the amino acid sequence of SEQ ID NO: 9.
Embodiment 8. The antigenic polypeptide of embodiment 1 or 2, wherein the HSP-binding peptide comprises the amino acid sequence of SEQ ID NO: 10, optionally wherein the amino acid sequence of the HSP-binding peptide consists of the amino acid sequence of SEQ ID NO: 10.
Embodiment 9. The antigenic polypeptide of embodiment 1 or 2, wherein the HSP-binding peptide comprises the amino acid sequence of SEQ ID NO: 11, optionally wherein the amino acid sequence of the HSP-binding peptide consists of the amino acid sequence of SEQ ID NO: 11.
Embodiment 10. The antigenic polypeptide of embodiment 1 or 2, wherein the HSP-binding peptide comprises the amino acid sequence of SEQ ID NO: 12, optionally wherein the amino acid sequence of the HSP-binding peptide consists of the amino acid sequence of SEQ ID NO: 12.
Embodiment 11. The antigenic polypeptide of embodiment 1 or 2, wherein the HSP-binding peptide comprises the amino acid sequence of SEQ ID NO: 13, optionally wherein the amino acid sequence of the HSP-binding peptide consists of the amino acid sequence of SEQ ID NO: 13.
Embodiment 12. The antigenic polypeptide of embodiment 1 or 2, wherein the HSP-binding peptide comprises the amino acid sequence of SEQ ID NO: 14, optionally wherein the amino acid sequence of the HSP-binding peptide consists of the amino acid sequence of SEQ ID NO: 14.
Embodiment 13. The antigenic polypeptide of embodiment 1 or 2, wherein the HSP-binding peptide comprises the amino acid sequence of SEQ ID NO: 15, optionally wherein the amino acid sequence of the HSP-binding peptide consists of the amino acid sequence of SEQ ID NO: 15.
Embodiment 14. The antigenic polypeptide of embodiment 1 or 2, wherein the HSP-binding peptide comprises the amino acid sequence of SEQ ID NO: 16, optionally wherein the amino acid sequence of the HSP-binding peptide consists of the amino acid sequence of SEQ ID NO: 16.
Embodiment 15. The antigenic polypeptide of embodiment 1 or 2, wherein the HSP-binding peptide comprises the amino acid sequence of SEQ ID NO: 17, optionally wherein the amino acid sequence of the HSP-binding peptide consists of the amino acid sequence of SEQ ID NO: 17.
Embodiment 16. The antigenic polypeptide of embodiment 1 or 2, wherein the HSP-binding peptide comprises the amino acid sequence of SEQ ID NO: 18, optionally wherein the amino acid sequence of the HSP-binding peptide consists of the amino acid sequence of SEQ ID NO: 18.
Embodiment 17. The antigenic polypeptide of embodiment 1 or 2, wherein the HSP-binding peptide comprises the amino acid sequence of SEQ ID NO: 19, optionally wherein the amino acid sequence of the HSP-binding peptide consists of the amino acid sequence of SEQ ID NO: 19.
Embodiment 18. The antigenic polypeptide of embodiment 1 or 2, wherein the HSP-binding peptide comprises the amino acid sequence of SEQ ID NO: 20, optionally wherein the amino acid sequence of the HSP-binding peptide consists of the amino acid sequence of SEQ ID NO: 20.
Embodiment 19. The antigenic polypeptide of embodiment 1 or 2, wherein the HSP-binding peptide comprises the amino acid sequence of SEQ ID NO: 21, optionally wherein the amino acid sequence of the HSP-binding peptide consists of the amino acid sequence of SEQ ID NO: 21.
Embodiment 20. The antigenic polypeptide of embodiment 1 or 2, wherein the HSP-binding peptide comprises the amino acid sequence of SEQ ID NO: 22, optionally wherein the amino acid sequence of the HSP-binding peptide consists of the amino acid sequence of SEQ ID NO: 22.
Embodiment 21. The antigenic polypeptide of embodiment 1 or 2, wherein the HSP-binding peptide comprises the amino acid sequence of SEQ ID NO: 23, optionally wherein the amino acid sequence of the HSP-binding peptide consists of the amino acid sequence of SEQ ID NO: 23.
Embodiment 22. The antigenic polypeptide of embodiment 1 or 2, wherein the HSP-binding peptide comprises the amino acid sequence of SEQ ID NO: 24, optionally wherein the amino acid sequence of the HSP-binding peptide consists of the amino acid sequence of SEQ ID NO: 24.
Embodiment 23. The antigenic polypeptide of embodiment 1 or 2, wherein the HSP-binding peptide comprises the amino acid sequence of SEQ ID NO: 25, optionally wherein the amino acid sequence of the HSP-binding peptide consists of the amino acid sequence of SEQ ID NO: 25.
Embodiment 24. The antigenic polypeptide of embodiment 1 or 2, wherein the HSP-binding peptide comprises the amino acid sequence of SEQ ID NO: 26, optionally wherein the amino acid sequence of the HSP-binding peptide consists of the amino acid sequence of SEQ ID NO: 26.
Embodiment 25. The antigenic polypeptide of embodiment 1 or 2, wherein the HSP-binding peptide comprises the amino acid sequence of SEQ ID NO: 27, optionally wherein the amino acid sequence of the HSP-binding peptide consists of the amino acid sequence of SEQ ID NO: 27.
Embodiment 26. The antigenic polypeptide of embodiment 1 or 2, wherein the HSP-binding peptide comprises the amino acid sequence of SEQ ID NO: 28, optionally wherein the amino acid sequence of the HSP-binding peptide consists of the amino acid sequence of SEQ ID NO: 28.
Embodiment 27. The antigenic polypeptide of embodiment 1 or 2, wherein the HSP-binding peptide comprises the amino acid sequence of SEQ ID NO: 29, optionally wherein the amino acid sequence of the HSP-binding peptide consists of the amino acid sequence of SEQ ID NO: 29.
Embodiment 28. The antigenic polypeptide of embodiment 1 or 2, wherein the HSP-binding peptide comprises the amino acid sequence of SEQ ID NO: 30, optionally wherein the amino acid sequence of the HSP-binding peptide consists of the amino acid sequence of SEQ ID NO: 30.
Embodiment 29. The antigenic polypeptide of embodiment 1 or 2, wherein the HSP-binding peptide comprises the amino acid sequence of SEQ ID NO: 31, optionally wherein the amino acid sequence of the HSP-binding peptide consists of the amino acid sequence of SEQ ID NO: 31.
Embodiment 30. The antigenic polypeptide of embodiment 1 or 2, wherein the HSP-binding peptide comprises the amino acid sequence of SEQ ID NO: 32, optionally wherein the amino acid sequence of the HSP-binding peptide consists of the amino acid sequence of SEQ ID NO: 32.
Embodiment 31. The antigenic polypeptide of embodiment 1 or 2, wherein the HSP-binding peptide comprises the amino acid sequence of SEQ ID NO: 33, optionally wherein the amino acid sequence of the HSP-binding peptide consists of the amino acid sequence of SEQ ID NO: 33.
Embodiment 32. The antigenic polypeptide of embodiment 1 or 2, wherein the HSP-binding peptide comprises the amino acid sequence of SEQ ID NO: 34, optionally wherein the amino acid sequence of the HSP-binding peptide consists of the amino acid sequence of SEQ ID NO: 34.
Embodiment 33. The antigenic polypeptide of embodiment 1 or 2, wherein the HSP-binding peptide comprises the amino acid sequence of SEQ ID NO: 35, optionally wherein the amino acid sequence of the HSP-binding peptide consists of the amino acid sequence of SEQ ID NO: 35.
Embodiment 34. The antigenic polypeptide of embodiment 1 or 2, wherein the HSP-binding peptide comprises the amino acid sequence of SEQ ID NO: 36, optionally wherein the amino acid sequence of the HSP-binding peptide consists of the amino acid sequence of SEQ ID NO: 36.
Embodiment 35. The antigenic polypeptide of embodiment 1 or 2, wherein the HSP-binding peptide comprises the amino acid sequence of SEQ ID NO: 37, optionally wherein the amino acid sequence of the HSP-binding peptide consists of the amino acid sequence of SEQ ID NO: 37.
Embodiment 36. The antigenic polypeptide of embodiment 1 or 2, wherein the HSP-binding peptide comprises the amino acid sequence of SEQ ID NO: 38, optionally wherein the amino acid sequence of the HSP-binding peptide consists of the amino acid sequence of SEQ ID NO: 38.
Embodiment 37. The antigenic polypeptide of embodiment 1 or 2, wherein the HSP-binding peptide comprises the amino acid sequence of SEQ ID NO: 39, optionally wherein the amino acid sequence of the HSP-binding peptide consists of the amino acid sequence of SEQ ID NO: 39.
Embodiment 38. The antigenic polypeptide of embodiment 1 or 2, wherein the HSP-binding peptide comprises the amino acid sequence of SEQ ID NO: 40, optionally wherein the amino acid sequence of the HSP-binding peptide consists of the amino acid sequence of SEQ ID NO: 40.
Embodiment 39. The antigenic polypeptide of embodiment 1 or 2, wherein the HSP-binding peptide comprises the amino acid sequence of SEQ ID NO: 41, optionally wherein the amino acid sequence of the HSP-binding peptide consists of the amino acid sequence of SEQ ID NO: 41.
Embodiment 40. The antigenic polypeptide of embodiment 1 or 2, wherein the HSP-binding peptide comprises the amino acid sequence of SEQ ID NO: 42, optionally wherein the amino acid sequence of the HSP-binding peptide consists of the amino acid sequence of SEQ ID NO: 42.
Embodiment 41. The antigenic polypeptide of any one of the preceding embodiments, wherein the MHC-binding peptide is 8 to 50 amino acids in length, optionally 8, 9, 10, 11, 12, 13, 14, 15, 16, 17, 18, 19, 20, 21, 22, 23, 24, 25, 26, 27, 28, 29, 30, 31, 32, 33, 34, 35, 36, 37, 38, 39, 40, 41, 42, 43, 44, 45, 46, 47, 48, 49, or 50 amino acids in length.
Embodiment 42. The antigenic polypeptide of any one of the preceding embodiments, wherein the C-terminus of the WIC-binding peptide is linked to the N-terminus of the HSP-binding peptide.
Embodiment 43. The antigenic polypeptide of any one of embodiments 1-41, wherein the N-terminus of the MHC-binding peptide is linked to the C-terminus of the HSP-binding peptide.
Embodiment 44. The antigenic polypeptide of any one of embodiments 1-43, wherein the HSP-binding peptide is linked to the WIC-binding peptide via a chemical linker.
Embodiment 45. The antigenic polypeptide of any one of embodiments 1-43, wherein the HSP-binding peptide is linked to the WIC-binding peptide via a peptide linker.
Embodiment 46. The antigenic polypeptide of embodiment 45, wherein the peptide linker comprises the amino acid sequence of SEQ ID NO: 43, optionally wherein the amino acid sequence of the peptide linker consists of the amino acid sequence of SEQ ID NO: 43.
Embodiment 47. The antigenic polypeptide of embodiment 45, wherein the peptide linker comprises the amino acid sequence of FR, optionally wherein the amino acid sequence of the peptide linker consists of the amino acid sequence of FR.
Embodiment 48. The antigenic polypeptide of embodiment 46 or 47, wherein the N-terminus of the MHC-binding peptide is linked to the C-terminus of:
(a) the amino acid sequence of X₁X₂X₃X₄X₅X₆X₇FFRK (SEQ ID NO: 68), wherein X₁ is omitted, N, F, or Q; X₂ is W, L, or F; X₃ is L or I; X₄ is R, L, or K; X₅ is L, W, or I; X₆ is T, L, F, K, R, or W; and X₇ is W, G, K, or F;
(b) the amino acid sequence of X₁LX₂LTX₃FFRK (SEQ ID NO: 69), wherein X₁ is W or F; X₂ is R or K; and X₃ is W, F, or G;
(c) the amino acid sequence of NX₁LX₂LTX₃FFRK (SEQ ID NO: 70), wherein X₁ is W or F; X₂ is R or K; and X₃ is W, F, or G;
(d) the amino acid sequence of WLX₁LTX₂FFRK (SEQ ID NO: 71), wherein X₁ is R or K; and X₂ is W or G;
(e) the amino acid sequence of NWLX₁LTX₂FFRK (SEQ ID NO: 72), wherein X₁ is R or K; and X₂ is W or G;
(f) the amino acid sequence of NWX₁X₂X₃X₄X₅FFRK (SEQ ID NO: 73), wherein X₁ is L or I; X₂ is L, R, or K; X₃ is L or I; X₄ is T, L, F, K, R, or W; and X₅ is W or K; or
(g) an amino acid sequence selected from the group consisting of SEQ ID NOs: 74-97.
Embodiment 49. The antigenic polypeptide of embodiment 46 or 47, wherein the N-terminus of the MHC-binding peptide is linked to the C-terminus of the amino acid sequence set forth in SEQ ID NO: 74.
Embodiment 50. The antigenic polypeptide of embodiment 46 or 47, wherein the N-terminus of the MHC-binding peptide is linked to the C-terminus of the amino acid sequence set forth in SEQ ID NO: 75.
Embodiment 51. The antigenic polypeptide of embodiment 46 or 47, wherein the N-terminus of the MHC-binding peptide is linked to the C-terminus of the amino acid sequence set forth in SEQ ID NO: 76.
Embodiment 52. The antigenic polypeptide of embodiment 46 or 47, wherein the N-terminus of the MHC-binding peptide is linked to the C-terminus of the amino acid sequence set forth in SEQ ID NO: 77.
Embodiment 53. The antigenic polypeptide of embodiment 46 or 47, wherein the N-terminus of the MHC-binding peptide is linked to the C-terminus of the amino acid sequence set forth in SEQ ID NO: 78.
Embodiment 54. The antigenic polypeptide of embodiment 46 or 47, wherein the N-terminus of the WIC-binding peptide is linked to the C-terminus of the amino acid sequence set forth in SEQ ID NO: 79.
Embodiment 55. The antigenic polypeptide of embodiment 46 or 47, wherein the N-terminus of the WIC-binding peptide is linked to the C-terminus of the amino acid sequence set forth in SEQ ID NO: 80.
Embodiment 56. The antigenic polypeptide of embodiment 46 or 47, wherein the N-terminus of the WIC-binding peptide is linked to the C-terminus of the amino acid sequence set forth in SEQ ID NO: 81.
Embodiment 57. The antigenic polypeptide of embodiment 46 or 47, wherein the N-terminus of the WIC-binding peptide is linked to the C-terminus of the amino acid sequence set forth in SEQ ID NO: 82.
Embodiment 58. The antigenic polypeptide of embodiment 46 or 47, wherein the N-terminus of the WIC-binding peptide is linked to the C-terminus of the amino acid sequence set forth in SEQ ID NO: 83.
Embodiment 59. The antigenic polypeptide of embodiment 46 or 47, wherein the N-terminus of the WIC-binding peptide is linked to the C-terminus of the amino acid sequence set forth in SEQ ID NO: 84.
Embodiment 60. The antigenic polypeptide of embodiment 46 or 47, wherein the N-terminus of the WIC-binding peptide is linked to the C-terminus of the amino acid sequence set forth in SEQ ID NO: 85.
Embodiment 61. The antigenic polypeptide of embodiment 46 or 47, wherein the N-terminus of the WIC-binding peptide is linked to the C-terminus of the amino acid sequence set forth in SEQ ID NO: 86.
Embodiment 62. The antigenic polypeptide of embodiment 46 or 47, wherein the N-terminus of the WIC-binding peptide is linked to the C-terminus of the amino acid sequence set forth in SEQ ID NO: 87.
Embodiment 63. The antigenic polypeptide of embodiment 46 or 47, wherein the N-terminus of the WIC-binding peptide is linked to the C-terminus of the amino acid sequence set forth in SEQ ID NO: 88.
Embodiment 64. The antigenic polypeptide of embodiment 46 or 47, wherein the N-terminus of the WIC-binding peptide is linked to the C-terminus of the amino acid sequence set forth in SEQ ID NO: 89.
Embodiment 65. The antigenic polypeptide of embodiment 46 or 47, wherein the N-terminus of the WIC-binding peptide is linked to the C-terminus of the amino acid sequence set forth in SEQ ID NO: 90.
Embodiment 66. The antigenic polypeptide of embodiment 46 or 47, wherein the N-terminus of the WIC-binding peptide is linked to the C-terminus of the amino acid sequence set forth in SEQ ID NO: 91.
Embodiment 67. The antigenic polypeptide of embodiment 46 or 47, wherein the N-terminus of the WIC-binding peptide is linked to the C-terminus of the amino acid sequence set forth in SEQ ID NO: 92.
Embodiment 68. The antigenic polypeptide of embodiment 46 or 47, wherein the N-terminus of the WIC-binding peptide is linked to the C-terminus of the amino acid sequence set forth in SEQ ID NO: 93.
Embodiment 69. The antigenic polypeptide of embodiment 46 or 47, wherein the N-terminus of the WIC-binding peptide is linked to the C-terminus of the amino acid sequence set forth in SEQ ID NO: 94.
Embodiment 70. The antigenic polypeptide of embodiment 46 or 47, wherein the N-terminus of the WIC-binding peptide is linked to the C-terminus of the amino acid sequence set forth in SEQ ID NO: 95.
Embodiment 71. The antigenic polypeptide of embodiment 46 or 47, wherein the N-terminus of the WIC-binding peptide is linked to the C-terminus of the amino acid sequence set forth in SEQ ID NO: 96.
Embodiment 72. The antigenic polypeptide of embodiment 46 or 47, wherein the N-terminus of the WIC-binding peptide is linked to the C-terminus of the amino acid sequence set forth in SEQ ID NO: 97.
Embodiment 73. The isolated polypeptide of embodiment 46 or 47, wherein the C-terminus of the WIC-binding peptide is linked to the N-terminus of:
(a) the amino acid sequence of FFRKX₁X₂X₃X₄X₅X₆X₇ (SEQ ID NO: 44), wherein X₁ is omitted, N, F, or Q; X₂ is W, L, or F; X₃ is L or I; X₄ is R, L, or K; X₅ is L, W, or I; X₆ is T, L, F, K, R, or W; and X₇ is W, G, K, or F;
(b) the amino acid sequence of FFRKX₁LX₂LTX₃ (SEQ ID NO: 45), wherein X₁ is W or F; X₂ is R or K; and X₃ is W, F, or G;
(c) the amino acid sequence of FFRKNX₁LX₂LTX₃ (SEQ ID NO: 46), wherein X₁ is W or F; X₂ is R or K; and X₃ is W, F, or G;
(d) the amino acid sequence of FFRKWLX₁LTX₂ (SEQ ID NO: 47), wherein X₁ is R or K; and X₂ is W or G;
(e) the amino acid sequence of FFRKNWLX₁LTX₂ (SEQ ID NO: 48), wherein X₁ is R or K; and X₂ is W or G;
(f) the amino acid sequence of FFRKNWX₁X₂X₃X₄X₅ (SEQ ID NO: 49), wherein X₁ is L or I; X₂ is L, R, or K; X₃ is L or I; X₄ is T, L, F, K, R, or W; and X₅ is W or K; or
(g) an amino acid sequence selected from the group consisting of SEQ ID NOs: 50-67.
Embodiment 74. The antigenic polypeptide of embodiment 46 or 47, wherein the C-terminus of the WIC-binding peptide is linked to the N-terminus of the amino acid sequence set forth in SEQ ID NO: 50.
Embodiment 75. The antigenic polypeptide of embodiment 46 or 47, wherein the C-terminus of the WIC-binding peptide is linked to the N-terminus of the amino acid sequence set forth in SEQ ID NO: 51.
Embodiment 76. The antigenic polypeptide of embodiment 46 or 47, wherein the C-terminus of the WIC-binding peptide is linked to the N-terminus of the amino acid sequence set forth in SEQ ID NO: 52.
Embodiment 77. The antigenic polypeptide of embodiment 46 or 47, wherein the C-terminus of the WIC-binding peptide is linked to the N-terminus of the amino acid sequence set forth in SEQ ID NO: 53.
Embodiment 78. The antigenic polypeptide of embodiment 46 or 47, wherein the C-terminus of the WIC-binding peptide is linked to the N-terminus of the amino acid sequence set forth in SEQ ID NO: 54.
Embodiment 79. The antigenic polypeptide of embodiment 46 or 47, wherein the C-terminus of the WIC-binding peptide is linked to the N-terminus of the amino acid sequence set forth in SEQ ID NO: 55.
Embodiment 80. The antigenic polypeptide of embodiment 46 or 47, wherein the C-terminus of the WIC-binding peptide is linked to the N-terminus of the amino acid sequence set forth in SEQ ID NO: 56.
Embodiment 81. The antigenic polypeptide of embodiment 46 or 47, wherein the C-terminus of the WIC-binding peptide is linked to the N-terminus of the amino acid sequence set forth in SEQ ID NO: 57.
Embodiment 82. The antigenic polypeptide of embodiment 46 or 47, wherein the C-terminus of the WIC-binding peptide is linked to the N-terminus of the amino acid sequence set forth in SEQ ID NO: 58.
Embodiment 83. The antigenic polypeptide of embodiment 46 or 47, wherein the C-terminus of the WIC-binding peptide is linked to the N-terminus of the amino acid sequence set forth in SEQ ID NO: 59.
Embodiment 84. The antigenic polypeptide of embodiment 46 or 47, wherein the C-terminus of the WIC-binding peptide is linked to the N-terminus of the amino acid sequence set forth in SEQ ID NO: 60.
Embodiment 85. The antigenic polypeptide of embodiment 46 or 47, wherein the C-terminus of the WIC-binding peptide is linked to the N-terminus of the amino acid sequence set forth in SEQ ID NO: 61.
Embodiment 86. The antigenic polypeptide of embodiment 46 or 47, wherein the C-terminus of the WIC-binding peptide is linked to the N-terminus of the amino acid sequence set forth in SEQ ID NO: 62.
Embodiment 87. The antigenic polypeptide of embodiment 46 or 47, wherein the C-terminus of the WIC-binding peptide is linked to the N-terminus of the amino acid sequence set forth in SEQ ID NO: 63.
Embodiment 88. The antigenic polypeptide of embodiment 46 or 47, wherein the C-terminus of the WIC-binding peptide is linked to the N-terminus of the amino acid sequence set forth in SEQ ID NO: 64.
Embodiment 89. The antigenic polypeptide of embodiment 46 or 47, wherein the C-terminus of the WIC-binding peptide is linked to the N-terminus of the amino acid sequence set forth in SEQ ID NO: 65.
Embodiment 90. The antigenic polypeptide of embodiment 46 or 47, wherein the C-terminus of the WIC-binding peptide is linked to the N-terminus of the amino acid sequence set forth in SEQ ID NO: 66.
Embodiment 91. The antigenic polypeptide of embodiment 46 or 47, wherein the C-terminus of the WIC-binding peptide is linked to the N-terminus of the amino acid sequence set forth in SEQ ID NO: 67.
Embodiment 92. The antigenic polypeptide of embodiment 1, comprising an amino acid sequence selected from the group consisting of SEQ ID NOs: 3001-8806, 8809, and 8810.
Embodiment 93. The antigenic polypeptide of any one of the preceding embodiments, wherein the antigenic polypeptide is 15 to 100 amino acids in length, optionally 15, 16, 17, 18, 19, 20, 21, 22, 23, 24, 25, 26, 27, 28, 29, 30, 31, 32, 33, 34, 35, 36, 37, 38, 39, 40, 41, 42, 43, 44, 45, 46, 47, 48, 49, 50, 51, 52, 53, 54, 55, 56, 57, 58, 59, 60, 61, 62, 63, 64, 65, 66, 67, 68, 69, 70, 71, 72, 73, 74, 75, 76, 77, 78, 79, 80, 81, 82, 83, 84, 85, 86, 87, 88, 89, 90, 91, 92, 93, 94, 95, 96, 97, 98, 99, or 100 amino acids in length.
Embodiment 94. The antigenic polypeptide of embodiment 1, wherein the amino acid sequence of the antigenic polypeptide consists of an amino acid sequence selected from the group consisting of SEQ ID NOs: 3001-8806, 8809, and 8810.
Embodiment 95. The antigenic polypeptide of any one of the preceding embodiments, wherein the antigenic polypeptide is chemically synthesized.
Embodiment 96. The antigenic polypeptide of any one of the preceding embodiments, comprising a phosphopeptide selected from the group consisting of SEQ ID NOs: 98-3000 and 8808, wherein a phosphorylated amino acid residue of the phosphopeptide is replaced by a non-hydrolyzable mimetic of the phosphorylated amino acid residue.
Embodiment 97. A composition comprising: (i) at least one of the antigenic polypeptides of any one of embodiments 1-96; (ii) at least one polypeptide comprising an amino acid sequence selected from the group consisting of SEQ ID NOs: 98-3000 and 8808, optionally, 2, 3, 4, 5, 6, 7, 8, 9, 10, 11, 12, 13, 14, 15, 16, 17, 18, 19, 20, 21, 22, 23, 24, 25, 26, 27, 28, 29, 30, 31, 32, 33, 34, 35, 36, 37, 38, 39, 40, 41, 42, 43, 44, 45, 46, 47, 48, 49, or 50 different polypeptides comprising an amino acid sequence selected from the group consisting of SEQ ID NOs: 98-3000 and 8808; (iii) at least one polypeptide, wherein the amino acid sequence of the polypeptide consists of an amino acid sequence selected from the group consisting of SEQ ID NOs: 98-3000 and 8808, optionally 2, 3, 4, 5, 6, 7, 8, 9, 10, 11, 12, 13, 14, 15, 16, 17, 18, 19, 20, 21, 22, 23, 24, 25, 26, 27, 28, 29, 30, 31, 32, 33, 34, 35, 36, 37, 38, 39, 40, 41, 42, 43, 44, 45, 46, 47, 48, 49, or 50 different polypeptides, wherein the amino acid sequence of each polypeptide consists of an amino acid sequence selected from the group consisting of SEQ ID NOs: 98-3000 and 8808; or (iv) at least one polypeptide, wherein the polypeptide consists of an amino acid sequence selected from the group consisting of SEQ ID NOs: 98-3000 and 8808, optionally 2, 3, 4, 5, 6, 7, 8, 9, 10, 11, 12, 13, 14, 15, 16, 17, 18, 19, 20, 21, 22, 23, 24, 25, 26, 27, 28, 29, 30, 31, 32, 33, 34, 35, 36, 37, 38, 39, 40, 41, 42, 43, 44, 45, 46, 47, 48, 49, or 50 different polypeptides, wherein each polypeptide consists of an amino acid sequence selected from the group consisting of SEQ ID NOs: 98-3000 and 8808.
Embodiment 98. A composition comprising a complex of the antigenic polypeptide of any one of embodiments 1-96 and a purified stress protein.
Embodiment 99. The composition of embodiment 98, wherein the stress protein is selected from the group consisting of Hsc70, Hsp70, Hsp90, Hsp110, Grp170, Gp96, Calreticulin, and a mutant or fusion protein thereof.
Embodiment 100. The composition of embodiment 99, wherein the stress protein is an Hsc70, optionally a human Hsc70.
Embodiment 101. The composition of embodiment 100, wherein the Hsc70 comprises the amino acid sequence of SEQ ID NO: 8807.
Embodiment 102. The composition of embodiment 100, wherein the amino acid sequence of the Hsc70 consists of the amino acid sequence of SEQ ID NO: 8807.
Embodiment 103. The composition of any one of embodiments 98-102, wherein the stress protein is a recombinant protein.
Embodiment 104. The composition any one of embodiments 97-103, comprising 2, 3, 4, 5, 6, 7, 8, 9, 10, 11, 12, 13, 14, 15, 16, 17, 18, 19, 20, 21, 22, 23, 24, 25, 26, 27, 28, 29, 30, 31, 32, 33, 34, 35, 36, 37, 38, 39, 40, 41, 42, 43, 44, 45, 46, 47, 48, 49, or 50 different antigenic polypeptides.
Embodiment 105. The composition of embodiment 104, wherein each of the different polypeptides comprise the same HSP-binding peptide and a different MHC-binding peptide.
Embodiment 106. The composition of any one of embodiments 97-105, wherein the total amount of the antigenic polypeptide(s) in the composition is about 0.1 to 20 nmol, optionally about 3, 4, 5, or 6 nmol.
Embodiment 107. The composition of any one of embodiments 98-106, wherein the amount of the stress protein in the composition is about 10 μg to 600 μg, optionally about 120 μg, 240 μg, or 480 μg.
Embodiment 108. The composition of any one of embodiments 98-107, wherein the molar ratio of the antigenic polypeptide(s) to the stress protein is about 0.5:1 to about 5:1, optionally about 1:1, 1.25:1, 1.5:1, 2:1, 2.5:1, 3:1, 3.5:1, 4:1, 4.5:1, or 5:1.
Embodiment 109. The composition of any one of embodiments 97-108, wherein the composition further comprises an adjuvant.
Embodiment 110. The composition of embodiment 109, wherein the adjuvant comprises a saponin or an immunostimulatory nucleic acid.
Embodiment 111. The composition of embodiment 110, wherein the adjuvant comprises QS-21.
Embodiment 112. The composition of embodiment 111, wherein the amount of the QS-21 in the composition is about 10 μg to about 200 optionally about 25 μg, 50 μg, 75 μg, 100 μg, 125 μg, 150 μg, 175 μg, or 200 μg.
Embodiment 113. The composition of any one of embodiments 109-112, wherein the adjuvant comprises a TLR agonist, optionally a TLR4 agonist, TLR5 agonist, TLR7 agonist, TLR8 agonist, and/or TLR9 agonist.
Embodiment 114. The composition of any one of embodiments 97-113, further comprising a pharmaceutically acceptable carrier or excipient.
Embodiment 115. The composition of embodiment 114, wherein the composition is in a unit dosage form.
Embodiment 116. A method of inducing a cellular immune response to a polypeptide (e.g., an antigenic polypeptide) in a subject, the method comprising administering to the subject an effective amount of the antigenic polypeptide of any one of embodiments 1-96 or the composition of any one of embodiments 97-115.
Embodiment 117. The method of embodiment 116, wherein the subject has cancer, optionally Acute Myeloid Leukemia (AML) or colorectal cancer.
Embodiment 118. A method of treating a disease in a subject, the method comprising administering to the subject an effective amount of the antigenic polypeptide of any one of embodiments 1-96 or the composition of any one of embodiments 97-115.
Embodiment 119. The method of embodiment 118, wherein the disease is an infection of a pathogenic microbe.
Embodiment 120. The method of any one of embodiments 116-119, wherein the composition is administered to the subject weekly for four weeks.
Embodiment 121. The method of embodiment 120, wherein at least two further doses of the composition are administered biweekly to the subject after the four weekly doses.
Embodiment 122. The method of embodiment 120 or 121, wherein at least one booster dose of the composition is administered three months after the final weekly or biweekly dose.
Embodiment 123. The method of embodiment 122, wherein the composition is further administered every three months for at least 1 year.
Embodiment 124. The method of any one of embodiments 116-123, further comprising administering to the subject lenalidomide, dexamethasone, interleukin-2, recombinant interferon alfa-2b, or PEG-interferon alfa-2b.
Embodiment 125. The method of any one of embodiments 116-124, further comprising administering to the subject an indoleamine dioxygenase-1 (IDO-1) inhibitor.
Embodiment 126. The method of embodiment 125, wherein the IDO-1 inhibitor is 4-amino-N-(3-chloro-4-fluorophenyl)-N′-hydroxy-1,2,5-oxadiazole-3-carboximidamide.
Embodiment 127. The method of any one of embodiments 116-126, further comprising administering to the subject an immune checkpoint antibody.
Embodiment 128. The method of embodiment 127, wherein the immune checkpoint antibody is selected from the group consisting of an agonistic anti-GITR antibody, an agonistic anti-OX40 antibody, an antagonistic anti-PD-1 antibody, an antagonistic anti-CTLA-4 antibody, an antagonistic anti-TIM-3 antibody, an antagonistic anti-LAG-3 antibody, an antagonistic anti-TIGIT antibody, an agonistic anti-CD96 antibody, an antagonistic anti-VISTA antibody, an antagonistic anti-CD73 antibody, an agonistic anti-CD137 antibody, an antagonist anti-CEACAM1 antibody, an agonist anti-ICOS antibody, and/or an antigen-binding fragment thereof.
Embodiment 129. A kit comprising a first container containing the antigenic polypeptide of any one of embodiments 1-96, or the composition of any one of embodiments 97-115 and a second container containing a purified stress protein capable of binding to the antigenic polypeptide.
Embodiment 130. The kit of embodiment 129, wherein the total amount of the polypeptide(s) in the first container is about 0.1 to 20 nmol, optionally about 3, 4, 5, or 6 nmol.
Embodiment 131. The kit of embodiment 129 or 130, wherein the stress protein is selected from the group consisting of Hsc70, Hsp70, Hsp90, Hsp110, Grp170, Gp96, Calreticulin, and a mutant or fusion protein thereof.
Embodiment 132. The kit of embodiment 131, wherein the stress protein is an Hsc70, optionally a human Hsc70.
Embodiment 133. The kit of embodiment 132, wherein the Hsc70 comprises the amino acid sequence of SEQ ID NO: 8807.
Embodiment 134. The kit of embodiment 132, wherein the amino acid sequence of the Hsc70 consists of the amino acid sequence of SEQ ID NO: 8807.
Embodiment 135. The kit of any one of embodiments 129-134, wherein the stress protein is a recombinant protein.
Embodiment 136. The kit of any one of embodiments 129-135, wherein the amount of the stress protein in the second container is about 10 μg to 600 μg, optionally about 120 μg, 240 μg, or 480 μg.
Embodiment 137. The kit of any one of embodiments 129-136, wherein the molar ratio of the polypeptide to the stress protein is about 0.5:1 to 5:1, optionally about 1:1, 1.25:1, 1.5:1, 2:1, 2.5:1, 3:1, 3.5:1, 4:1, 4.5:1, or 5:1.
Embodiment 138. The kit of any one of embodiments 129-137, further comprising a third container containing an adjuvant.
Embodiment 139. The kit of embodiment 138, wherein the adjuvant comprises a saponin or an immunostimulatory nucleic acid.
Embodiment 140. The kit of embodiment 139, wherein the adjuvant comprises QS-21.
Embodiment 141. The kit of embodiment 140, wherein the amount of the QS-21 in the third container is about 10 μg to about 200 μg, optionally about 25 μg, 50 μg, 75 μg, 100 μg, 125 μg, 150 μg, 175 μg, or 200 μg.
Embodiment 142. The kit of any one of embodiments 138-141, wherein the adjuvant comprises a TLR agonist, optionally a TLR4 agonist, TLR5 agonist, TLR7 agonist, TLR8 agonist, and/or TLR9 agonist.
Embodiment 143. A method of making a vaccine, the method comprising mixing one or more of the polypeptides of any one of embodiments 1-96, or the composition of any one of embodiments 97-115, with a purified stress protein under suitable conditions such that the purified stress protein binds to at least one of the polypeptides.
Embodiment 144. The method of embodiment 143, wherein the stress protein is selected from the group consisting of Hsc70, Hsp70, Hsp90, Hsp110, Grp170, Gp96, Calreticulin, and a mutant or fusion protein thereof.
Embodiment 145. The method of embodiment 144, wherein the stress protein is an Hsc70, optionally human a Hsc70.
Embodiment 146. The method of embodiment 145, wherein the Hsc70 comprises the amino acid sequence of SEQ ID NO: 8807.
Embodiment 147. The method of embodiment 145, wherein the amino acid sequence of the Hsc70 consists of the amino acid sequence of SEQ ID NO: 8807.
Embodiment 148. The method of any one of embodiments 143-147, wherein the stress protein is a recombinant protein.
Embodiment 149. The method of any one of embodiments 143-148, wherein the molar ratio of the polypeptide to the stress protein is about 0.5:1 to 5:1, optionally about 1:1, 1.25:1, 1.5:1, 2:1, 2.5:1, 3:1, 3.5:1, 4:1, 4.5:1, or 5:1.
Embodiment 150. The method of any one of embodiments 143-149, wherein the suitable conditions comprise a temperature of about 37° C.

### 6. DETAILED DESCRIPTION

[0008] The instant disclosure provides novel antigenic polypeptides comprising tumor-associated peptides, and compositions comprising the same. Such antigenic polypeptides and compositions are particularly useful as immunotherapeutics (e.g., cancer vaccines). Also provided are methods of inducing a cellular immune response using such polypeptides and compositions, methods of treating a disease using such polypeptides and compositions, kits comprising such polypeptides and compositions, and methods of making such compositions.

### 6.1 Definitions

[0009] Unless otherwise defined herein, scientific and technical terms used herein have the meanings that are commonly understood by those of ordinary skill in the art. In the event of any latent ambiguity, definitions provided herein take precedent over any dictionary or extrinsic definition. Unless otherwise required by context, singular terms shall include pluralities and plural terms shall include the singular. The use of “or” means “and/or” unless stated otherwise. The use of the term “including”, as well as other forms, such as “includes” and “included”, is not limiting.

[0010] As used herein, the terms “about” and “approximately,” when used to modify a numeric value or numeric range, indicate that deviations of 5% to 10% above (e.g., up to 5% to 10% above) and 5% to 10% below (e.g., up to 5% to 10% below) the recited value or range remain within the intended meaning of the recited value or range.

[0011] As used herein, the term “antigenic polypeptide” refers to a non-naturally occurring polymer comprising one or more peptides (e.g., an MHC-binding peptide and/or an HSP-binding peptide). An antigenic polypeptide can comprise one or more non-amino-acid-residue structures. In certain embodiments, an antigenic polypeptide comprises a chemical linker, e.g., a chemical linker linking two peptide portions of the polypeptide.

[0012] As used herein, the terms “major histocompatibility complex” and “MHC” are used interchangeably and refer to an MHC class I molecule and/or an MHC class II molecule.

[0013] As used herein, the terms “human leukocyte antigen” and “HLA” are used interchangeably and refer to major histocompatibility complex (MHC) in humans. An HLA molecule may be a class I MHC molecule (e.g., HLA-A, HLA-B, HLA-C) or a class II MHC molecule (e.g., HLA-DP, HLA-DQ, HLA-DR).

[0014] As used herein, the terms “major histocompatibility complex-binding peptide” and “MHC-binding peptide” are used interchangeably and refer to a peptide that binds to or is predicted to bind to an MHC molecule, e.g., such that the peptide is capable of being presented by the MHC molecule to a T-cell.

[0015] As used herein, the terms “heat shock protein-binding peptide” and “HSP-binding peptide” are used interchangeably and refer to a peptide that non-covalently binds to a heat shock protein (HSP).

[0016] As used herein, the term “peptide linker” refers to a peptide bond or a peptide sequence that links a C-terminal amino acid residue of a first peptide to an N-terminal amino acid residue of a second peptide.

[0017] As used herein, the term “chemical linker” refers to any chemical bond or moiety that is capable of linking two molecules (e.g., two peptides), wherein the bond or moiety is not a peptide linker.

[0018] As used herein, the term “O-GlcNAcylated” means O-GlcNAc modified, wherein the O-GlcNAc is fused either directly or indirectly to the modified amino acid, as described in Malaker, S. A. et al. “Identification of Glycopeptides as Post-Translationally Modified Neoantigens in Leukemia” Cancer Immunol Res. 5(5):376-384 (2017), which is incorporated by reference in its entirety herein. One of skill in the art would understand the term “hexose-GlcNAcylated” to have the meaning described in Malaker, S. A. et al. “Identification and Characterization of Complex Glycosylated Peptides Presented by the MHC Class II Processing Pathway in Melanoma” J. Proteome Res. 16(1):228-237 (2017), which is incorporated by reference in its entirety herein.

[0019] As used herein, the terms “treat,” “treating,” and “treatment” refer to methods that generally involve administration of an agent (e.g., a polypeptide disclosed herein) to a subject having a disease or disorder, or predisposed to having such a disease or disorder, in order to cure, delay, reduce the severity of, or ameliorate one or more symptoms of the disease or disorder, or in order to prolong the survival of the subject beyond that expected in the absence of such treatment.

[0020] As used herein, the term “effective amount” in the context of the administration of a therapy to a subject refers to the amount of a therapy that achieves a desired prophylactic or therapeutic effect.

[0021] As used herein, the term “subject” includes any human or non-human animal.

### 6.2 Antigenic Polypeptides

[0022] In one aspect, the instant disclosure provides an antigenic polypeptide comprising a tumor-associated MHC-binding peptide and an HSP-binding peptide.

[0023] Exemplary HSP-binding peptides are set forth in Table 1 herein. Exemplary MHC-binding peptides are set forth in Tables 2 and 3 herein. Exemplary antigenic polypeptides are set forth in Tables 4-7 herein.

TABLE 1
Amino acid sequences of exemplary HSP-binding peptides,
linkers, and HSPs

| | | SEQ ID |
|---|---|---|
| Description | Amino Acid Sequence | NO |
| Consensus | X₁X₂X₃X₄X₅X₆X₇, wherein: | 1 |
| sequence 1 | X₁ is omitted, N, F, or Q; | |
| | X₂ is W, L, or F; | |
| | X₃ is L or I; | |
| | X₄ is R, L, or K; | |
| | X₅ is L, W, or I; | |
| | X₆ is T, L, F, K, R, or W; and | |
| | X₇ is W, G, K, or F | |
| Consensus | X₁LX₂LTX₃, wherein: | 2 |
| sequence 2 | X₁ is W or F; | |
| | X₂ is R or K; and | |
| | X₃ is W, F, or G | |
| Consensus | NX₁LX₂LTX₃, wherein: | 3 |
| sequence 3 | X₁ is W or F; | |
| | X₂ is R or K; and | |
| | X₃ is W, F, or G | |
| Consensus | WLX₁LTX₂, wherein: | 4 |
| sequence 4 | X₁ is R or K; and | |
| | X₂ is W or G | |
| Consensus | NWLX₁LTX₂, wherein: | 5 |
| sequence 5 | X₁ is R or K; and | |
| | X₂ is W or G | |
| Consensus | NWX₁X₂X₃X₄X₅, wherein: | 6 |
| sequence 6 | X₁ is L or I; | |
| | X₂ is L, R, or K; | |
| | X₃ is L or I; | |
| | X₄ is T, L, F, K, R, or W; and | |
| | X₅ is W or K | |
| HSP1 | NLLRLTG | 7 |
| HSP016 | WLRLTW | 8 |
| HSP017 | NWLRLTW | 9 |
| HSP018 | WLKLTW | 10 |
| HSP019 | NWLKLTW | 11 |
| HSP020 | WLRLTG | 12 |
| HSP021 | NWLRLTG | 13 |
| HSP022 | FLRLTF | 14 |
| HSP023 | NFLRLTF | 15 |
| HSP024 | WLRLTF | 16 |
| HSP025 | NWLRLTF | 17 |
| HSP040 | WLKLTF | 18 |
| HSP041 | NWLKLTF | 19 |
| HSP042 | WLKLTG | 20 |
| HSP043 | NWLKLTG | 21 |
| HSP044 | FLRLTW | 22 |
| HSP045 | NFLRLTW | 23 |
| HSP046 | FLRLTG | 24 |
| HSP047 | NFLRLTG | 25 |
| HSP048 | FLKLTW | 26 |
| HSP049 | NFLKLTW | 27 |
| HSP050 | FLKLTF | 28 |
| HSP051 | NFLKLTF | 29 |
| HSP103 | FLKLTG | 30 |
| HSP104 | NFLKLTG | 31 |
| HSP185 | NWLLLTW | 32 |
| HSP186 | NLLRWTG | 33 |
| HSP188 | FWLRLTW | 34 |
| HSP189 | NWLRLLW | 35 |
| HSP190 | NWLRLFW | 36 |
| HSP191 | NWLRLKW | 37 |
| HSP192 | NWIRITW | 38 |
| HSP193 | QWLRLTW | 39 |
| HSP194 | NWLKLKW | 40 |
| HSP195 | NWLKLRW | 41 |
| HSP196 | NWLKLWK | 42 |
| Linker1 | FFRK | 43 |
| Linker2 | FR | N/A |
| Consensus | FFRKX₁X₂X₃X₄X₅X₆X₇, wherein: | 44 |
| sequence 1 | X₁ is omitted, N, F, or Q; | |
| with N- | X₂ is W, L, or F; | |
| terminal | X₃ is L or I; | |
| linker | X₄ is R, L, or K; | |
| | X₅ is L, W, or I; | |
| | X₆ is T, L, F, K, R, or W; and | |
| | X₇ is W, G, K, or F | |
| Consensus | FFRKX₁LX₂LTX₃, wherein: | 45 |
| sequence 2 | X₁ is W or F; | |
| with N- | X₂ is R or K; and | |
| terminal | X₃ is W, F, or G | |
| linker | | |
| Consensus | FFRKNX₁LX₂LTX₃, wherein: | 46 |
| sequence 3 | X₁ is W or F; | |
| with N- | X₂ is R or K; and | |
| terminal | X₃ is W, F, or G | |
| linker | | |
| Consensus | FFRKWLX₁LTX₂, wherein: | 47 |
| sequence 4 | X₁ is R or K; and | |
| with N- | X₂ is W or G | |
| terminal | | |
| linker | | |
| Consensus | FFRKNWLX₁LTX₂, wherein: | 48 |
| sequence 5 | X₁ is R or K; and | |
| with N- | X₂ is W or G | |
| terminal | | |
| linker | | |
| Consensus | FFRKNWX₁X₂X₃X₄X₅, wherein: | 49 |
| sequence 6 | X₁ is L or I; | |
| with N- | X₂ is L, R, or K; | |
| terminal | X₃ is L or I; | |
| linker | X₄ is T, L, F, K, R, or W; and | |
| | X₅ is W or K | |
| Linker1- | FFRKNLLRLTG | 50 |
| HSP1 | | |
| Linker2- | FRNLLRLTG | 51 |
| HSP1 | | |
| HSP001 | FFRKNLLRLTG | 52 |
| HSP003 | FFRKNWLLLTW | 53 |
| HSP004 | FFRKNLLRWTG | 54 |
| HSP006 | FFRKNWLRLTW | 55 |
| HSP012 | FFRKNWLKLTW | 56 |
| HSP013 | FFRKNWIRITW | 57 |
| HSP014 | FFRKQWLRLTW | 58 |
| HSP026 | FFRKNWLRLTG | 59 |
| HSP027 | FFRKNFLRLTF | 60 |
| HSP028 | FRNWLRLTW | 61 |
| HSP029 | FRNWLKLTW | 62 |
| HSP030 | FRNWLRLTG | 63 |
| HSP031 | FRNFLRLTF | 64 |
| HSP055 | FFRKNWLKLKW | 65 |
| HSP057 | FFRKNWLKLRW | 66 |
| HSP058 | FFRKNWLKLWK | 67 |
| Consensus | X₁X₂X₃X₄X₅X₆X₇FFRK, wherein: | 68 |
| sequence 1 | X₁ is omitted, N, F, or Q; | |
| with C- | X₂ is W, L, or F; | |
| terminal | X₃ is L or I; | |
| linker | X₄ is R, L, or K; | |
| | X₅ is L, W, or I; | |
| | X₆ is T, L, F, K, R, or W; and | |
| | X₇ is W, G, K, or F | |
| Consensus | X₁LX₂LTX₃FFRK, wherein: | 69 |
| sequence 2 | X₁ is W or F; | |
| with C- | X₂ is R or K; and | |
| terminal | X₃ is W, F, or G | |
| linker | | |
| Consensus | NX₁LX₂LTX₃FFRK, wherein: | 70 |
| sequence 3 | X₁ is W or F; | |
| with C- | X₂ is R or K; and | |
| terminal | X₃ is W, F, or G | |
| linker | | |
| Consensus | WLX₁LTX₂FFRK, wherein: | 71 |
| sequence 4 | X₁ is R or K; and | |
| with C- | X₂ iS W or G | |
| terminal | | |
| linker | | |
| Consensus | NWLX₁LTX₂FFRK, wherein: | 72 |
| sequence 5 | X₁ is R or K; and | |
| with C- | X₂ iS W or G | |
| terminal | | |
| linker | | |
| Consensus | NWX₁X₂X₃X₄X₅FFRK, wherein: | 73 |
| sequence 6 | X₁ is L or I; | |
| with C- | X₂ is L, R, or K; | |
| terminal | X₃ is L or I; | |
| linker | X₄ is T, L, F, K, R, or W; and | |
| | X₅ is W or K | |
| HSP1- | NLLRLTGFFRK | 74 |
| Linker1 | | |
| HSP1- | NLLRLTGFR | 75 |
| Linker2 | | |
| HSP032 | NWLRLTWFFRK | 76 |
| HSP033 | NWLKLTWFFRK | 77 |
| HSP034 | NWLRLTGFFRK | 78 |
| HSP035 | NFLRLTFFFRK | 79 |
| HSP036 | NWLRLTWFR | 80 |
| HSP037 | NWLKLTWFR | 81 |
| HSP038 | NWLRLTGFR | 82 |
| HSP039 | NFLRLTFFR | 83 |
| HSP197 | NLLRLTWFFRK | 84 |
| HSP198 | NRLLLTGFFRK | 85 |
| HSP199 | NWLLLTWFFRK | 86 |
| HSP200 | NLLRWTGFFRK | 87 |
| HSP201 | NRLWLTGFFRK | 88 |
| HSP202 | FWLRLTWFFRK | 89 |
| HSP203 | NWLRLLWFFRK | 90 |
| HSP204 | NWLRLFWFFRK | 91 |
| HSP205 | NWLRLKWFFRK | 92 |
| HSP206 | NWIRITWFFRK | 93 |
| HSP207 | QWLRLTWFFRK | 94 |
| HSP208 | NWLKLKWFFRK | 95 |
| HSP209 | NWLKLRWFFRK | 96 |
| HSP210 | NWLKLWKFFRK | 97 |
| rh-Hsc70 | SKGPAVGIDLGTTYSCVGVFQHGKVEIIANDQGNRTTPSYVA | 8807 |
| | FTDTERLIGDAAKNQVAMNPTNTVFDAKRLIGRRFDDAVVQS | |
| | DMKHWPFMVVNDAGRPKVQVEYKGETKSFYPEEVSSMVLTKM | |
| | KEIAEAYLGKTVTNAVVTVPAYFNDSQRQATKDAGTIAGLNV | |
| | LRIINEPTAAAIAYGLDKKVGAERNVLIFDLGGGTFDVSILT | |
| | IEDGIFEVKSTAGDTHLGGEDFDNRMVNHFIAEFKRKHKKDI | |
| | SENKRAVRRLRTACERAKRTLSSSTQASIEIDSLYEGIDFYT | |
| | SITRARFEELNADLFRGTLDPVEKALRDAKLDKSQIHDIVLV | |
| | GGSTRIPKIQKLLQDFFNGKELNKSINPDEAVAYGAAVQAAI | |
| | LSGDKSENVQDLLLLDVTPLSLGIETAGGVMTVLIKRNTTIP | |
| | TKQTQTFTTYSDNQPGVLIQVYEGERAMTKDNNLLGKFELTG | |
| | IPPAPRGVPQIEVTFDIDANGILNVSAVDKSTGKENKITITN | |
| | DKGRLSKEDIERMVQEAEKYKAEDEKQRDKVSSKNSLESYAF | |
| | NMKATVEDEKLQGKINDEDKQKILDKCNEIINWLDKNQTAEK | |
| | EEFEHQQKELEKVCNPIITKLYQSAGGMPGGMPGGFPGGGAP | |
| | PSGGASSGPTIEEVD | |

TABLE 2
Amino acid sequences of exemplary
MHC-binding peptides

| SEQ ID NO | Amino Acid Sequence |
|---|---|
| 98 | (AcS)AARESHPHGVKRSAsPDDDLG |
| 99 | AAEsPSFL |
| 100 | AASNFKsPVKTIR |
| 101 | ADLsPEREV |
| 102 | AEDEIGtPRKF |
| 103 | AEDEIGtPRKY |
| 104 | AEEEIGtPRKF |
| 105 | AEEEIGtPRKW |
| 106 | AEEEIGtPRKY |
| 107 | AENARSAsF |
| 108 | AENsPTRQQF |
| 109 | AENsPTRQQW |
| 110 | AENsPTRQQY |
| 111 | AENsSSREL |
| 112 | AEQGsPRVSY |
| 113 | AESsPTAGKKF |
| 114 | AESsPTAGKKL |
| 115 | AESsPTAGKKW |
| 116 | AESsPTAGKKY |
| 117 | AGDsPGSQF |
| 118 | AILsPAFKV |
| 119 | AIMRsPQMV |
| 120 | AIsDLQQL |
| 121 | AKLsETIS |
| 122 | ALAAsPHAV |
| 123 | ALDsGASLLHL |
| 124 | ALDsGASLLHV |
| 125 | ALGNtPPFL |
| 126 | ALGsRESLATI |
| 127 | ALGsRESLATV |
| 128 | ALIHQsLGL |
| 129 | ALIHQsLGV |
| 130 | ALLGSKsPDPYRL |
| 131 | ALLGSKsPDPYRV |
| 132 | ALLsLLKRV |
| 133 | ALMGsPQLV |
| 134 | ALMGsPQLVAA |
| 135 | ALRSsPIMRK |
| 136 | ALRSsPIMRY |
| 137 | ALVsPPALHNA |
| 138 | ALVsPPALHNV |
| 139 | ALYsGVHKK |
| 140 | ALYsGVHKY |
| 141 | ALYsPAQPSL |
| 142 | ALYsPAQPSV |
| 143 | ALYtPQAPK |
| 144 | ALYtPQAPY |
| 145 | AMAAsPHAV |
| 146 | AMDsGASLLHL |
| 147 | AMDsGASLLHV |
| 148 | AMGsRESLATI |
| 149 | AMGsRESLATV |
| 150 | AMLGSKsPDPYRL |
| 151 | AMLGSKsPDPYRV |
| 152 | AMPGsPVEV |
| 153 | AMRSsPIMRK |
| 154 | AMVsPPALHNA |
| 155 | AMVsPPALHNV |
| 156 | AMYsGVHKK |
| 157 | APDsPRAFL |
| 158 | APLARASsL |
| 159 | APPAYEKLs |
| 160 | APPAYEKLsAEQ |
| 161 | APPAYEKLsAEQSPP |
| 162 | APPAYEKLsAEQSPPP |
| 163 | APPAYEKLsAEQSPPPY |
| 164 | APPPLVPAPRPSsPPRGPGPARADR |
| 165 | APRAPsASPLAL |
| 166 | APRDRRAVsF |
| 167 | APRKGsFSAL |
| 168 | APRKGsFSALF |
| 169 | APRKGsFSALL |
| 170 | APRKGsFSALM |
| 171 | APRKGsFSALV |
| 172 | APRNGsGVAL |
| 173 | APRRYsSSF |
| 174 | APRRYsSSL |
| 175 | APRRYsSSM |
| 176 | APRRYsSSV |
| 177 | APRsPPPSRF |
| 178 | APRsPPPSRL |
| 179 | APRsPPPSRM |
| 180 | APRsPPPSRP |
| 181 | APRsPPPSRV |
| 182 | APSLFHLNtL |
| 183 | APSSARAsPLL |
| 184 | APSTYAHLsPAK |
| 185 | APSTYAHLsPAKTPPPP |
| 186 | APSVRsLSL |
| 187 | APSVRSLsL |
| 188 | ARFsPDDKYSF |
| 189 | ARFsPDDKYSK |
| 190 | ARFsPDDKYSL |
| 191 | ARFsPDDKYSM |
| 192 | ARFsPDDKYSR |
| 193 | ARFsPDDKYSY |
| 194 | ASDEIGtPRKF |
| 195 | ASDEIGtPRKY |
| 196 | ASEEIGtPRKF |
| 197 | ASEEIGtPRKY |
| 198 | AsISRLsGEQVDGKG |
| 199 | AsISRLSGEQVDGKG |
| 200 | ASISRLsGEQVDGKG |
| 201 | AsIsRLSGEQVDGKGQ |
| 202 | AsISRLSGEQVDKGKG |
| 203 | ASKAsPTLDFTER |
| 204 | ASKMTQPQSKSAFPLSRKNKGsGsLDG |
| 205 | AsLGFVF |
| 206 | AsPTIEAQGTSPAHDN |
| 207 | AsPTIEAQGTSPAHDNI |
| 208 | AsPTIEAQGTSPAHDNIA |
| 209 | AtAGPRLGF |
| 210 | AtAGPRLGW |
| 211 | AtAGPRLGY |
| 212 | ATDEIGtPRKF |
| 213 | ATDEIGtPRKY |
| 214 | ATEEIGtPRKF |
| 215 | ATEEIGtPRKY |
| 216 | ATWsGSEFEV |
| 217 | ATYtPQAPK |
| 218 | ATYtPQAPKY |
| 219 | AVIHQsLGL |
| 220 | AVIHQsLGV |
| 221 | AVRPTRLsL |
| 222 | AVVsPPALHNA |
| 223 | AVVsPPALHNV |
| 224 | AYEKLsAEQSPP |
| 225 | DAKKsPLAL |
| 226 | DDDWTHLsSKEVDP |
| 227 | DDDWTHLsSKEVDPS |
| 228 | DDDWTHLsSKEVDPST |
| 229 | DDDWTHLsSKEVDPSTG |
| 230 | DDWTHLsSKEVDPS |
| 231 | DEFERIKtF |
| 232 | DEFERIKtW |
| 233 | DEFERIKtY |
| 234 | DEISHRAsF |
| 235 | DEISHRAsW |
| 236 | DEISHRAsY |
| 237 | DERLRINsF |
| 238 | DERLRINsL |
| 239 | DERLRINsW |
| 240 | DERLRINsY |
| 241 | DKLsVIAEDSESGKQ |
| 242 | DKLsVIAEDSESGKQN |
| 243 | DKLsVIAEDSESGKQNP |
| 244 | DKLsVIAEDSESGKQNPG |
| 245 | DKLsVIAEDSESGKQNPGDS |
| 246 | DLKRRsmSI |
| 247 | DLKRRsMSI |
| 248 | DLKSSKAsL |
| 249 | DLRtVEKEL |
| 250 | DLsEEKFL |
| 251 | DLsEEKFV |
| 252 | DLVPLsPLKK |
| 253 | DLWKItKVMD |
| 254 | DMVPLsPLKK |
| 255 | DPTRRFFKVtPPPGSGPQ |
| 256 | DQFERIKtL |
| 257 | DQISHRAsL |
| 258 | DSDPLsPLKY |
| 259 | DSEPLsPLKY |
| 260 | DSsEEKFL |
| 261 | DSsEEKFV |
| 262 | DSVPLsPLKY |
| 263 | DTDPLsPLKY |
| 264 | DTEPLsPLKY |
| 265 | DTVPLSPLKY |
| 266 | DWTHLsSKEVDPS |
| 267 | DWTHLsSKEVDPSTG |
| 268 | EEGsPTMVEKGLEPGVFTL |
| 269 | EELsPTAKF |
| 270 | EELsPTKAF |
| 271 | EEMPENALPsDEDDKDPNDPYRAL |
| 272 | EERRsPPAP |
| 273 | EEsSDDGKKF |
| 274 | EESsDDGKKF |
| 275 | EEsSDDGKKW |
| 276 | EESsDDGKKW |
| 277 | EEsSDDGKKY |
| 278 | EESsDDGKKY |
| 279 | EGEEPTVYsDEEEPKDESARKND |
| 280 | EGsPTMVEKGLEPGVFTL |
| 281 | ELFSsPPAV |
| 282 | ELKKsPTSLK |
| 283 | ELKKsPTSLY |
| 284 | ELLMPHRIsSHF |
| 285 | ELLMPHRIsSHFL |
| 286 | ELRISGsVQL |
| 287 | EMKKsPTSLK |
| 288 | EPAsPAAsISRLsGEQVDGKG |
| 289 | EPAsPAAsISRLSGEQVDGKG |
| 290 | EPKRRsARF |
| 291 | EPKRRsARL |
| 292 | EPKRRsARM |
| 293 | EPKRRsARV |
| 294 | EPRsPSHSF |
| 295 | EPRsPSHSL |
| 296 | EPRsPSHSM |
| 297 | EPRsPSHSV |
| 298 | ERsPLLSQETAGQKP |
| 299 | ERsPLLSQETAGQKPL |
| 300 | ESDsLPRY |
| 301 | ESESLPRY |
| 302 | ESsVRSQEDQLSR |
| 303 | ESsVRSQEDQLSRR |
| 304 | ETDsLPRY |
| 305 | ETEsLPRY |
| 306 | FDKHTLGDsDNES |
| 307 | FEDDDsNEKL |
| 308 | FIEsPSKL |
| 309 | FIEsPSKY |
| 310 | FIGsPTTPAGL |
| 311 | FKMPQEKsPGYS |
| 312 | FKsPVKTIR |
| 313 | FKtQPVTF |
| 314 | FLDNsFEKV |
| 315 | FLDRPPtPLFI |
| 316 | FLDsLRDLI |
| 317 | FLDtPIAKV |
| 318 | FLFDKPVsPLLL |
| 319 | FLGVRPKsA |
| 320 | FLIIRtVLQL |
| 321 | FLITGGGKGsGFSL |
| 322 | FLLsQNFDDE |
| 323 | FLYsGKETK |
| 324 | FLYsGKETY |
| 325 | FPHsLLSVF |
| 326 | FPHsLLSVI |
| 327 | FPHsLLSVL |
| 328 | FPHsLLSVM |
| 329 | FPHsLLSVV |
| 330 | FPIsPVRF |
| 331 | FPIsPVRL |
| 332 | FPIsPVRM |
| 333 | FPIsPVRV |
| 334 | FPLDsPKTLVL |
| 335 | FPRRHsVTL |
| 336 | FPRsPTKSSF |
| 337 | FPRsPTKSSL |
| 338 | FPRsPTKSSLDF |
| 339 | FPRsPTKSSLDL |
| 340 | FPRsPTKSSLDM |
| 341 | FPRsPTKSSLDV |
| 342 | FPRsPTKSSM |
| 343 | FPRsPTKSSV |
| 344 | FRFsGRTEY |
| 345 | FRGRYRsPY |
| 346 | FRKsMVEHY |
| 347 | FRRsPIKSSLDY |
| 348 | FRRsPTKSSF |
| 349 | FRRsPTKSSL |
| 350 | FRRsPTKSSLD |
| 351 | FRRsPTKSSLDF |
| 352 | FRRsPTKSSLDL |
| 353 | FRRsPTKSSLDM |
| 354 | FRRsPTKSSLDV |
| 355 | FRRsPTKSSLDY |
| 356 | FRRsPTKSSM |
| 357 | FRRsPTKSSV |
| 358 | FRsPTKSSLDF |
| 359 | FRsPTKSSLDL |
| 360 | FRsPTKSSLDM |
| 361 | FRsPTKSSLDV |
| 362 | FRYsGKTEF |
| 363 | FRYsGKTEK |
| 364 | FRYsGKTEL |
| 365 | FRYsGKTEM |
| 366 | FRYsGKTER |
| 367 | FRYsGKTEY |
| 368 | FSDsHEGFSY |
| 369 | FSEsHEGFSY |
| 370 | FSEsPSKL |
| 371 | FSEsPSKY |
| 372 | FSIsPVRF |
| 373 | FSIsPVRL |
| 374 | FSIsPVRM |
| 375 | FSIsPVRV |
| 376 | FSsSHEGFSY |
| 377 | FSSsHEGFSY |
| 378 | FTDsHEGFSY |
| 379 | FTEsHEGFSY |
| 380 | FTEsPSKL |
| 381 | FTEsPSKY |
| 382 | FTKsPYQEF |
| 383 | FTsSHEGFSY |
| 384 | FVSKVMIGsPKKV |
| 385 | GALsPSLLHSL |
| 386 | GAQPGRHsF |
| 387 | GAQPGRHsL |
| 388 | GAQPGRHsV |
| 389 | GDDDWTHLsSKEVD |
| 390 | GDDDWTIILsSKEVDP |
| 391 | GDDDWTHLsSKEVDPS |
| 392 | GDDDWTHLsSKEVDPST |
| 393 | GDDDWTHLsSKEVDPSTG |
| 394 | GEAsPSHII |
| 395 | GEEsSDDGKKF |
| 396 | GEEsSDDGKKW |
| 397 | GEEsSDDGKKY |
| 398 | GEEsSDIDGKKF |
| 399 | GEIsPQREV |
| 400 | GERSPLLSQETAGQKP |
| 401 | GERsPLLSQETAGQKPL |
| 402 | GETsPRTKI |
| 403 | GGDDDWTHLsSKEVDPS |
| 404 | GGDDDWTHLsSKEVDPSTG |
| 405 | GGSFGGRSSGsP |
| 406 | GGSFGGRSSGsV |
| 407 | GIDsPSSSV |
| 408 | GIMsPLAKK |
| 409 | GLAPtPPSM |
| 410 | GLDsGFHSV |
| 411 | GLDsLDQVEI |
| 412 | GLGELLRsL |
| 413 | GLIRSRsFIFK |
| 414 | GLIRSRsFIFY |
| 415 | GLIsPELRHL |
| 416 | CLIsPNVQL |
| 417 | GLIsPVWGA |
| 418 | GLItPGGFSSV |
| 419 | GLLDsPTSI |
| 420 | GLLGsPARL |
| 421 | GLLGsPVRA |
| 422 | GLLGsPVRV |
| 423 | GLLsPARLYAI |
| 424 | GLLsPARLYAV |
| 425 | GLLsPRFVDV |
| 426 | GLLsPRHSL |
| 427 | GLSFGGRSSGsP |
| 428 | GLSFGGRSSGsV |
| 429 | GMLGsPVRV |
| 430 | GMLsPARLYAI |
| 431 | GMLsPARLYAV |
| 432 | GMLsPGKSIEV |
| 433 | GPKPLFRRMsS |
| 434 | GPKPLFRRMsSL |
| 435 | GPKPLFRRMsSLV |
| 436 | GPKPLFRRMsSLVG |
| 437 | GPKPLFRRMsSLVGP |
| 438 | GPKPLFRRMsSLVGPT |
| 439 | GPKPLFRRMsSLVGPTQ |
| 440 | GPKPLFRRMsSLVGPTQS |
| 441 | GPPYQRRGsL |
| 442 | GPQPGRHsF |
| 443 | GPQPGRHsL |
| 444 | GPQPGRHsV |
| 445 | GPRPGsPSAF |
| 446 | GPRPGsPSAL |
| 447 | GPRPGsPSAM |
| 448 | GPRPGsPSAV |
| 449 | GPRSAsLL |
| 450 | GPRsASLLSF |
| 451 | GPRSAsLLsF |
| 452 | GPRSASLLsF |
| 453 | GPRsAsLLSL |
| 454 | GPRsASLLSL |
| 455 | GPRSAsLLsL |
| 456 | GPRSAsLLSL |
| 457 | GPRSASLLsL |
| 458 | GPRsASLLSM |
| 459 | GPRSAsLLsM |
| 460 | GPRSASLLsM |
| 461 | GPRsASLLSV |
| 462 | GPKSAsLLSV |
| 463 | GPRSASLLsV |
| 464 | GPRsPKAPP |
| 465 | GPRsPPVTL |
| 466 | GQLsPGVQF |
| 467 | GRKsPPPSF |
| 468 | GRKsPPPSK |
| 469 | GRKsPPPSL |
| 470 | GRKsPPPSM |
| 471 | GRKsPPPSR |
| 472 | GRKsPPPSY |
| 473 | GRLGsPHRF |
| 474 | GRLGsPHRK |
| 475 | GRLGsPHRL |
| 476 | GRLGsPHRM |
| 477 | GRLGsPHRR |
| 478 | GRLGsPHRY |
| 479 | GRLsPAYSL |
| 480 | GRLsPKASQVF |
| 481 | GRLsPKASQVK |
| 482 | GRLsPKASQVL |
| 483 | GRLsPKASQVM |
| 484 | GRLsPKASQVR |
| 485 | GRLsPKASQVY |
| 486 | GRLsPVPVPF |
| 487 | GRLsPVPVPK |
| 488 | GRLsPVPVPL |
| 489 | GRLsPVPVPM |
| 490 | GRLsPVPVPR |
| 491 | GRLsPVPVPY |
| 492 | GRQsPSFKL |
| 493 | GRsSPPPGY |
| 494 | GRSsTASLVKF |
| 495 | GRSsTASLVKK |
| 496 | GRSsTASLVKKK |
| 497 | GRSsTASLVKL |
| 498 | GRSsTASLVKM |
| 499 | GRSsTASLVKR |
| 500 | GRSsTASLVKY |
| 501 | GRtGLPDL |
| 502 | GSALGGGGAGLSGRASGGAQsPLRYLHV |
| 503 | GSDsSDDGKKY |
| 504 | GSEsSDDGKKY |
| 505 | GsPHYFSPF |
| 506 | GsPHYFSPFRPY |
| 507 | GsPTMVEKGLEPGVFTL |
| 508 | GsQLAVMMYL |
| 509 | GTDsSDDGKKY |
| 510 | GTEsSDDGKKY |
| 511 | GTIRSRsFIFK |
| 512 | GTIRSRsFIFY |
| 513 | GtLPKY |
| 514 | GtLRRSDSQQAVK |
| 515 | GtLRRSDSQQAVKS |
| 516 | GtLRRSDSQQAVKSPP |
| 517 | GVAsPTITV |
| 518 | GVVsPTFEL |
| 519 | HEKKAYsF |
| 520 | HKGEIRGASTPFQFRAssP |
| 521 | HLHsPQHKL |
| 522 | HPKRSVsL |
| 523 | HPRsPNVL |
| 524 | HPRsPNVLSF |
| 525 | HPRsPNVLSL |
| 526 | HPRsPNVLSM |
| 527 | HPRsPNVLSV |
| 528 | HPRsPTPTF |
| 529 | HPRSPtPTF |
| 530 | HPRsPTPTL |
| 531 | HPRSPtPTL |
| 532 | HPRsPTPTM |
| 533 | HPRSPtPTM |
| 534 | HPRSPtPTV |
| 535 | HPsSPTPTV |
| 536 | HRLsPVKGEF |
| 537 | HRLsPVKGEK |
| 538 | HRLsPVKGER |
| 539 | HRLsPVKGEY |
| 540 | HRNsMKVFL |
| 541 | HRNsNPVIAEF |
| 542 | HRNsNPVIAEK |
| 543 | HRNsNPVIAEL |
| 544 | HRNsNPVIAER |
| 545 | HRNsNPVIAEY |
| 546 | HRYsTPHAF |
| 547 | HTAsPTGMMK |
| 548 | HVYtPSTTK |
| 549 | IEKIyIMKADTVIVG |
| 550 | IIEtPHKEI |
| 551 | IIEtPHKEY |
| 552 | IISsPLKGY |
| 553 | IISsPLTGK |
| 554 | ILDRtPEKL |
| 555 | ILDRtPEKV |
| 556 | ILDsGIYRI |
| 557 | ILDsGIYRV |
| 558 | ILKPRRsL |
| 559 | ILKsPEIQRA |
| 560 | ILKsPEIQRV |
| 561 | ILQtPQFQM |
| 562 | ILQVsIPSL |
| 563 | IMDRtPEKL |
| 564 | IMDRtPEKV |
| 565 | IMDsGIYRI |
| 566 | IMDsGIYRV |
| 567 | IMKsPEIQRA |
| 568 | IMKsPEIQRV |
| 569 | INKERRSsL |
| 570 | IPVgSSHNSL |
| 571 | IQFsPPFPGA |
| 572 | ISDGtLKY |
| 573 | ISDGtPLKY |
| 574 | ISDSAHtDY |
| 575 | ISDsMHSLY |
| 576 | ISDtPHKEI |
| 577 | ISDtPHKEY |
| 578 | ISEGtLKY |
| 579 | ISEGtPLKY |
| 580 | ISESAHtDY |
| 581 | ISEsMHSLY |
| 582 | ISELPHKEI |
| 583 | ISEtPHKEY |
| 584 | ISFSAHtDY |
| 585 | ISSsMIISLY |
| 586 | IStDRDPL |
| 587 | IStDRDPY |
| 588 | ITDGtLKY |
| 589 | ITDGtPLKY |
| 590 | ITDSAHtDY |
| 591 | ITDsMHSLY |
| 592 | ITDtPHKEI |
| 593 | ITDtPHKEY |
| 594 | ITEGtLKY |
| 595 | ITEGtPLKY |
| 596 | ITESAHtDY |
| 597 | ITEsMHSLY |
| 598 | ITEtPHKEI |
| 599 | ITEtPHKEY |
| 600 | ITQGtLKY |
| 601 | ITQGtPLKK |
| 602 | ITQGtPLKY |
| 603 | ITtDRDPL |
| 604 | ITtDRDPY |
| 605 | IVLsDSEVIQL |
| 606 | IVRyHQL |
| 607 | IVtDRDPL |
| 608 | IVtDRDPY |
| 609 | IYQyIQSRF |
| 610 | KAFsPVR |
| 611 | KAFsPVRSV |
| 612 | KAKsPAPGL |
| 613 | KAKsPAPGV |
| 614 | KARsPGRAF |
| 615 | KARsPGRAL |
| 616 | KARsPGRAM |
| 617 | KARsPGRAV |
| 618 | KASPKRLsL |
| 619 | KAVsLFLcY |
| 620 | KAVsLFLCY |
| 621 | KEGEEPTVYsDEEEPKDESARKND |
| 622 | KEKsPFRET |
| 623 | KELARQIsF |
| 624 | KEMsPTRQF |
| 625 | KEmsPTRQL |
| 626 | KEMsPTRQL |
| 627 | KEMsPTRQW |
| 628 | KEMsPTRQY |
| 629 | KESsPLSSRKI |
| 630 | KFRPPPLsL |
| 631 | KGIsSSSLKEK |
| 632 | KIAsEIAQL |
| 633 | KIDIVsSQKV |
| 634 | KIDsPTKVKK |
| 635 | KIEKIyIMKADTVIVG |
| 636 | KIEsLENLYL |
| 637 | KIFsGVFVK |
| 638 | KIFsGVFVKV |
| 639 | KIFsKQQGK |
| 640 | KIFsKQQGY |
| 641 | KIGsIIFQV |
| 642 | KIKsFEVvF |
| 643 | KIRSsPREAK |
| 644 | KIRSsPREAY |
| 645 | KIRTsPTFR |
| 646 | KIRTsPTFY |
| 647 | KLAsLEREASV |
| 648 | KLAsLLHQV |
| 649 | KLAsPEKLAGL |
| 650 | KLAsPELERL |
| 651 | KLAsPELERV |
| 652 | KLDIVsSQKV |
| 653 | KLDsFLDMQV |
| 654 | KLDsPRVTV |
| 655 | KLDsPTKVKK |
| 656 | KLDsPTKVKY |
| 657 | KLFPDtPLAL |
| 658 | KLFPDtPLAV |
| 659 | KLFsGTVRK |
| 660 | KLFsGVFVKV |
| 661 | KLFsKQQGK |
| 662 | KLFsKQQGY |
| 663 | KLFsPAHKK |
| 664 | KLFsPAIIKY |
| 665 | KLFsPSKEAEL |
| 666 | KLFsPSKEAEV |
| 667 | KLHGsLARAGK |
| 668 | KLHGsLARAGY |
| 669 | KLIDIVsSQKV |
| 670 | KLIDRTEsL |
| 671 | KLIDVsSQKV |
| 672 | KLIsSSSLKEK |
| 673 | KLIsSSSLKEY |
| 674 | KLKDRLPsI |
| 675 | KLKsNPDFLK |
| 676 | KLKsNPDFLKK |
| 677 | KLKsNPDFLKY |
| 678 | KLKsPAPGL |
| 679 | KLKsPAPGV |
| 680 | KLKsQEIFL |
| 681 | KLKSsPLIEKK |
| 682 | KLKSsPLIEKY |
| 683 | KLKtPLVAK |
| 684 | KLKtPLVAR |
| 685 | KLLDFGSLsNLQV |
| 686 | KLLQFYPsL |
| 687 | KLLQFYPsV |
| 688 | KLLsPSDEKL |
| 689 | KLLsPSNEKL |
| 690 | KLLsPSNEKV |
| 691 | KLLSSAQRtL |
| 692 | KLLSSAQRtV |
| 693 | KLLsTEEMEL |
| 694 | KLLsTEEMEV |
| 695 | KLLsVERIK |
| 696 | KLLtPIKEK |
| 697 | KLLtPIKEK |
| 698 | KLMAPDIsL |
| 699 | KLMAPDIsV |
| 700 | KLMIDRTEsV |
| 701 | KLMsDVEDV |
| 702 | KLMsPKADV |
| 703 | KLMsPKADVKL |
| 704 | KLMsPKADVKV |
| 705 | KLPDsPALA |
| 706 | KLPDsPALAK |
| 707 | KLPDsPALAKK |
| 708 | KLPDsPALAKY |
| 709 | KLPDsPALAY |
| 710 | KLPsPAPARK |
| 711 | KLPTsPLKMK |
| 712 | KLPTsPLKMY |
| 713 | KLPTtPVKAK |
| 714 | KLPTtPVKAY |
| 715 | KLQEFLQtL |
| 716 | KLQVtSLSV |
| 717 | KLRsPFLQK |
| 718 | KLRsPFLQY |
| 719 | KLRSsPREAK |
| 720 | KLRTsPTFK |
| 721 | KLsGDQPAAR |
| 722 | KLSGLsF |
| 723 | KLSsLGNLK |
| 724 | KLSsLGNLKK |
| 725 | KLSsLGNLKY |
| 726 | KLSsPRGGMK |
| 727 | KLSsPRGGMKK |
| 728 | KLSsPRGGMKY |
| 729 | KLsVIAEDSESGKQN |
| 730 | KLsVIAEDSESGKQNP |
| 731 | KLsVIAEDSESGKQNPG |
| 732 | KLVSFHDDsDEDL |
| 733 | KLYsEIDIKV |
| 734 | KLYsGNMEK |
| 735 | KMAsLLHQV |
| 736 | KMAsPELERL |
| 737 | KMAsPELERV |
| 738 | KMDIVsSQKV |
| 739 | KMDsFLDMQL |
| 740 | KMDsFLDMQV |
| 741 | KMDsPRVTV |
| 742 | KMDsPTKVKK |
| 743 | KMFPDtPLAL |
| 744 | KMFPDtPLAV |
| 745 | KMFsGTVRK |
| 746 | KMFsGVFVKV |
| 747 | KMFsKQQGK |
| 748 | KMFsPAHKK |
| 749 | KMFsPSKEAEL |
| 750 | KMFsPSKEAEV |
| 751 | KMHGsLARAGK |
| 752 | KMIDIVsSQKV |
| 753 | KMIDRTEsL |
| 754 | KMIsSSSLKEK |
| 755 | KMKsNPDFLK |
| 756 | KMKsNPDFLKK |
| 757 | KMKsNPDFLKY |
| 758 | KMKSsPLIEKK |
| 759 | KMKtPLVAK |
| 760 | KMKtPLVAR |
| 761 | KMLDFGSLsNLOV |
| 762 | KMLDFGSLsNLQV |
| 763 | KMLQFYPsL |
| 764 | KMLsPSNEKL |
| 765 | KMLsPSNEKV |
| 766 | KMLSSAQRtL |
| 767 | KMLSSAQRtV |
| 768 | KMLsVERIK |
| 769 | KMLtPIKEK |
| 770 | KMMAPDIsV |
| 771 | KMMsPKADVKL |
| 772 | KMMsPKADVKV |
| 773 | KMPTsPLKMK |
| 774 | KMPTtPVKAK |
| 775 | KMPTtPVKAY |
| 776 | KMRsPFLQK |
| 777 | KMRSsPREAK |
| 778 | KMRTsPTFK |
| 779 | KMSsLGNLK |
| 780 | KMSsLGNLKK |
| 781 | KMSsLGNLKY |
| 782 | KMSsPRGGMK |
| 783 | KMSsPRGGMKK |
| 784 | KMYsEIDIKV |
| 785 | KMYsGNMEK |
| 786 | KNRsWKYN |
| 787 | KNRsWKYNQ |
| 788 | KNRsWKYNQSISLR |
| 789 | KNRsWKYNQSISLRRP |
| 790 | KPAsPARRF |
| 791 | KPAsPARRL |
| 792 | KPAsPARRM |
| 793 | KPAsPARRV |
| 794 | KPAsPKFIVTF |
| 795 | KPAsPKFIVTL |
| 796 | KPAsPKFIVTM |
| 797 | KPAsPKFIVTV |
| 798 | KPEsRRSSL |
| 799 | KPEsRRsSLL |
| 800 | KPEsRRSsLL |
| 801 | KPEsRRSSLL |
| 802 | KPLIRsQSL |
| 803 | KPLIRSQsL |
| 804 | KPPHsPLVF |
| 805 | KPPHsPLVL |
| 806 | KPPHsPLVM |
| 807 | KPPHsPLVV |
| 808 | KPPsPEHQSF |
| 809 | KPPsPEHQSL |
| 810 | KPPsPEHQSM |
| 811 | KPPsPEHQSV |
| 812 | KPPsPSPIEF |
| 813 | KPPsPSPIEL |
| 814 | KPPsPSPIEM |
| 815 | KPPsPSPIEV |
| 816 | KPPtPGASF |
| 817 | KPPtPGASL |
| 818 | KPPtPGASM |
| 819 | KPPtPGASV |
| 820 | KPPYRSHsF |
| 821 | KPPYRSHsL |
| 822 | KPPYRSHsM |
| 823 | KPPYRSHsV |
| 824 | KPQTRGKtF |
| 825 | KPQTRGKtL |
| 826 | KPQTRGXtM |
| 827 | KPQTRGKtV |
| 828 | KPRPLsMDL |
| 829 | KPRPPPLsF |
| 830 | KPRPPPLsL |
| 831 | KPRPPPLsM |
| 832 | KPRPPPLsP |
| 833 | KPRPPPLsV |
| 834 | KPRRFsRsL |
| 835 | KPRRFsRSL |
| 836 | KPRsPDHVF |
| 837 | KPRsPDHVL |
| 838 | KPRsPDHVM |
| 839 | KPRsPDHVV |
| 840 | KPRsPFSKI |
| 841 | KPRsPPRAF |
| 842 | KPRsPPRAL |
| 843 | KPRsPPRALF |
| 844 | KPRsPPRALL |
| 845 | KPRsPPRALM |
| 846 | KPRsPPRALV |
| 847 | KPRsPPRALVF |
| 848 | KPRsPPRALVL |
| 849 | KPRsPPRALVLF |
| 850 | KPRsPPRALVLL |
| 851 | KPRsPPRALVLM |
| 852 | KPRsPPRALVLP |
| 853 | KPRsPPRALVLV |
| 854 | KPRsPPRALVM |
| 855 | KPRsPPRALVV |
| 856 | KPRsPPRAM |
| 857 | KPRsPPRAV |
| 858 | KPRsPVVEF |
| 859 | KPRsPVVEL |
| 860 | KPRsPVVEM |
| 861 | KPRsPVVEV |
| 862 | KPSsPRGSL |
| 863 | KPSsPRGSLL |
| 864 | KPVsPKSGTL |
| 865 | KPYsPLASF |
| 866 | KPYsPLASL |
| 867 | KPYsPLASM |
| 868 | KPYsPLASV |
| 869 | KQDsLVINL |
| 870 | KRAsFAKSF |
| 871 | KRAsFAKSK |
| 872 | KRAsFAKSL |
| 873 | KRAsFAKSM |
| 874 | KRAsFAKSR |
| 875 | KRAsFAKSV |
| 876 | KRAsFAKSY |
| 877 | KRAsGQAFEF |
| 878 | KRAsGQAFEK |
| 879 | KRAsGQAFEL |
| 880 | KRAsGQAFER |
| 881 | KRAsGQAFEY |
| 882 | KRASSPFRF |
| 883 | KRASsPFRK |
| 884 | KRASsPFRL |
| 885 | KRASsPFRM |
| 886 | KRASsPFRR |
| 887 | KRASsPFRY |
| 888 | KRAsVFVKF |
| 889 | KRAsVFVKK |
| 890 | KRAsVFVKL |
| 891 | KRAsVFVKM |
| 892 | KRAsVFVKR |
| 893 | KRAsVFVKY |
| 894 | KRAsYILRL |
| 895 | KRFsFKF |
| 896 | KRFsFKK |
| 897 | KRFsFKKsF |
| 898 | KRFsFKKSF |
| 899 | KRFsFKKSK |
| 900 | KRFsFKKSL |
| 901 | KRFsFKKSM |
| 902 | KRFsFKKSR |
| 903 | KRFsFKKSY |
| 904 | KRFsFKL |
| 905 | KRFsFKM |
| 906 | KRFsFKR |
| 907 | KRFsFKsSF |
| 908 | KRFsFKY |
| 909 | KRFsGTVRF |
| 910 | KRFsGTVRK |
| 911 | KRFsGTVRL |
| 912 | KRFsGTVRM |
| 913 | KRFsGTVRR |
| 914 | KRFsGTVRY |
| 915 | KRIVIsPKPF |
| 916 | KRKsFTSLY |
| 917 | KRLEKsPSF |
| 918 | KRLEKSPsF |
| 919 | KRLsPAPQF |
| 920 | KRLsPAPQK |
| 921 | KRLsPAPQL |
| 922 | KRLsPAPQM |
| 923 | KRLsPAPQR |
| 924 | KRLsPAPQY |
| 925 | KRLsTSPVRL |
| 926 | KRLsVERIF |
| 927 | KRLsVERIK |
| 928 | KRLsVERIL |
| 929 | KRLsVERIM |
| 930 | KRLsVERIR |
| 931 | KRLsVERIY |
| 932 | KRMsPKEF |
| 933 | KRMsPKEK |
| 934 | KRMsPKEL |
| 935 | KRMsPKER |
| 936 | KRMsPKEY |
| 937 | KRmsPKPEL |
| 938 | KRMsPKPEL |
| 939 | KRMsPKPF |
| 940 | KRMsPKPK |
| 941 | KRMsPKPL |
| 942 | KRMsPKPM |
| 943 | KRMsPKPR |
| 944 | KRMsPKPY |
| 945 | KRPEsPPSI |
| 946 | KRWQsPVTK |
| 947 | KRYsEPVSL |
| 948 | KRYsGNMEF |
| 949 | KRYsGNMEK |
| 950 | KRYsGNMEL |
| 951 | KRYsGNMEM |
| 952 | KRYsGNMER |
| 953 | KRYsGNmEY |
| 954 | KRYsGNMEY |
| 955 | KRYsRALYL |
| 956 | KSDsRQERY |
| 957 | KSEsRQERY |
| 958 | KSGELLAtW |
| 959 | KSKsNPDFLKK |
| 960 | KSKsNPFLKK |
| 961 | KSKtPLVAK |
| 962 | KSKtPLVAR |
| 963 | KSKtPLVAY |
| 964 | KsLVRLLLL |
| 965 | KSSsLGNLKK |
| 966 | KsVKALSSLHGDDQ |
| 967 | KsVKALSSLHGDDQD |
| 968 | KsVKALSSLHGDDQDsEDE |
| 969 | KSVKALSSLHGDDQDsEDE |
| 970 | KTDsRQERY |
| 971 | KTEsRQERY |
| 972 | KtLSPGKNGVVK |
| 973 | KtLSPGKNGVVY |
| 974 | KTMsGTFLL |
| 975 | KTMsPSQMIM |
| 976 | KTPTsPLKMK |
| 977 | KTPTsPLKMY |
| 978 | KTWKGsIGL |
| 979 | KVAsLLHQV |
| 980 | KVDsPVIF |
| 981 | KVHGsLARAGK |
| 982 | KVHGsLARAGY |
| 983 | KVKSsPLIEKK |
| 984 | KVKsSPLIEKL |
| 985 | KVKSsPLIEKL |
| 986 | KVKSsPLIEKY |
| 987 | KVLsKEFHL |
| 988 | KVLSPtAAK |
| 989 | KVLsSLVTL |
| 990 | KVLsTEEMEL |
| 991 | KVLStEEMEL |
| 992 | KVLtPIKeK |
| 993 | KVLtPIKEK |
| 994 | KVLtPIKEY |
| 995 | KVPDsPALAK |
| 996 | KVPDsPALAKK |
| 997 | KVPDsPALAKY |
| 998 | KVPDsPALAY |
| 999 | KVPTsPLKMY |
| 1000 | KVQsLRRAL |
| 1001 | KVQVtSLSV |
| 1002 | KVYsSSEFL |
| 1003 | KYIsGPHEL |
| 1004 | KYsPGKLRGN |
| 1005 | LGGGGAGLSGRASGGAQsPLRYLHV |
| 1006 | LKLsYLTWV |
| 1007 | LLAsPGHISV |
| 1008 | LLDPSRSYsY |
| 1009 | LLDtPVKTQY |
| 1010 | LLFsPVTSL |
| 1011 | LLFsPVTSV |
| 1012 | LLLsEEVEL |
| 1013 | LLNKSsPVK |
| 1014 | LLNKSsPVKK |
| 1015 | LLNKSsPVKY |
| 1016 | LMFsPVTSL |
| 1017 | LMFsPVTSV |
| 1018 | LMFsVTSI |
| 1019 | LMFsVTSL |
| 1020 | LMNKSsPVK |
| 1021 | TiMNKSsPVKK |
| 1022 | LMNKSsPVKY |
| 1023 | LPAsPHQF |
| 1024 | LPAsPHQL |
| 1025 | LPAsPHQM |
| 1026 | LPAsPHQV |
| 1027 | LPAsPRARF |
| 1028 | LPAsPRARL |
| 1029 | LPAsPRARM |
| 1030 | LPAsPRARV |
| 1031 | LPIFSRLsF |
| 1032 | LPIFSRLsI |
| 1033 | LPIFSRLsL |
| 1034 | LPIFSRLsM |
| 1035 | LPIFSRLsV |
| 1036 | LPKGLsASL |
| 1037 | LPKGLSAsL |
| 1038 | LPKsPPYTAF |
| 1039 | LPKsPPYTAL |
| 1040 | LPKsPPYTAM |
| 1041 | LPKsPPYTAV |
| 1042 | LPRGSsPSVF |
| 1043 | LPRGsSPSVL |
| 1044 | LPRGSsPSVL |
| 1045 | LPRGSsPSVM |
| 1046 | LPRGSsPSVV |
| 1047 | LPRmIsHSEL |
| 1048 | LPRMIsHSEL |
| 1049 | LPRPAsPAL |
| 1050 | LPRSSsMAA |
| 1051 | LPRSSsMAAGL |
| 1052 | LPRtPRPEL |
| 1053 | LPVsPRLQL |
| 1054 | LQLsPLKGLSL |
| 1055 | LQNItENQL |
| 1056 | LSDPSRSYsY |
| 1057 | LSDsDTEAKL |
| 1058 | LSDsDTEAKY |
| 1059 | LSDtPVKTQY |
| 1060 | LSEPSRSYsY |
| 1061 | LSEsDTEAKL |
| 1062 | LSEsDTEAKY |
| 1063 | LSEtPVKTQY |
| 1064 | LSKFRMPQPSSGREsPRH |
| 1065 | LSSsVIREL |
| 1066 | LTDPSRSYsY |
| 1067 | LTDPSsPTISSY |
| 1068 | LTDsDTEAKL |
| 1069 | LTDSDTEAKY |
| 1070 | LTDtPVKTQY |
| 1071 | LTEPSRSYsY |
| 1072 | LTEsDTEAKL |
| 1073 | LTEsDTEAKY |
| 1074 | LTEtPVKTOY |
| 1075 | LTEtPVKTQY |
| 1076 | MLAEsPSVPRL |
| 1077 | MLAEsPSVPRV |
| 1078 | MLRsPPRVSK |
| 1079 | MMRsPPRVSK |
| 1080 | MPRPsIKKAQNSQAARQ |
| 1081 | MPRQPsAIRM |
| 1082 | MPRQPsATRF |
| 1083 | MPRQPsATRL |
| 1084 | MPRQPsATRM |
| 1085 | MPRQPsATRV |
| 1086 | MRLsEWLQL |
| 1087 | MRLsRELQF |
| 1088 | MRLsRELQK |
| 1089 | MRLsRELQL |
| 1090 | MRLsRELQM |
| 1091 | MRLsRELQR |
| 1092 | MRLsRELQY |
| 1093 | MSDtYRLKY |
| 1094 | MSEtYRLKY |
| 1095 | MTDtYRLKY |
| 1096 | MTEtYRLKY |
| 1097 | MTRsPPRVSK |
| 1098 | MTRsPPRVSY |
| 1099 | NAPPAYEKLsAE |
| 1100 | NFKsPVKTIR |
| 1101 | NLELSKFRMPQPSSGREsPRH |
| 1102 | NLGsRNHVHQL |
| 1103 | NLLsPDGKMISV |
| 1104 | NLVERKNsK |
| 1105 | NLVERKNsL |
| 1106 | NMDsPGPML |
| 1107 | NMVERKNsK |
| 1108 | NMVERKNsL |
| 1109 | NRAMRRVsSVPSR |
| 1110 | NRAMRRVsSVPSRAQ |
| 1111 | NRsWKYNQSISLR |
| 1112 | NRsWKYNQSISLRRP |
| 1113 | NRYtNRVVTF |
| 1114 | NRYtNRVVTK |
| 1115 | NRYtNRVVTL |
| 1116 | NRYtNRVVTM |
| 1117 | NRYtNRVVTR |
| 1118 | NRYtNRVVTY |
| 1119 | NSDsPLRY |
| 1120 | NSEsPLRY |
| 1121 | NTDsPLRY |
| 1122 | NTEsPLRY |
| 1123 | NYVERKNsK |
| 1124 | NYVERKNsL |
| 1125 | NYVERKNsY |
| 1126 | PARsPVTEI |
| 1127 | PAYEKLsAE |
| 1128 | PAYEKLsAEQSP |
| 1129 | PmVTLsLNL |
| 1130 | PMVTLsLNL |
| 1131 | PNAPPAYEKLsA |
| 1132 | PPAYEKLsA |
| 1133 | PPAYEKLsAEQS |
| 1134 | PPLPEDSIKVIRNMRAAsPPA |
| 1135 | PYDPALGsPSR |
| 1136 | QAASNFKsPVKTIR |
| 1137 | QLDsPQRALY |
| 1138 | QLEsPQRALY |
| 1139 | QLFsPKKGQK |
| 1140 | QMFsPKKGQK |
| 1141 | QPQRRsLRL |
| 1142 | QPRsPGPDYSF |
| 1143 | QPRsPGPDYSL |
| 1144 | QPRsPGPDYSM |
| 1145 | QPRsPGPDYSV |
| 1146 | QPRtPsPLVF |
| 1147 | QPRtPSPLVF |
| 1148 | QPRtPsPLVL |
| 1149 | QPRtPSPLVL |
| 1150 | QPRtPsPLVM |
| 1151 | QPRtPSPLVM |
| 1152 | QPRtPsPLVV |
| 1153 | QPRtPSPLVV |
| 1154 | QPSFPsVLPA |
| 1155 | QRLsPLSAAY |
| 1156 | QSDsPQRALY |
| 1157 | QSEsPQRALY |
| 1158 | QTEsPQRALY |
| 1159 | QTEsPQRALY |
| 1160 | QVAMPVKKSPRRSsSDEQGLSYSSLKNV |
| 1161 | QVFsPKXGQK |
| 1162 | QVFsPKKGQY |
| 1163 | RADsPVHM |
| 1164 | RAFsFSKTPK |
| 1165 | RAFsFSKTPY |
| 1166 | RAFsVKFEV |
| 1167 | RAHsEPLAL |
| 1168 | RAHsSPASL |
| 1169 | RAHSsPASL |
| 1170 | RAKsPISLK |
| 1171 | RAKsPISLY |
| 1172 | RAPsPSSRF |
| 1173 | RAPsPSSRL |
| 1174 | RAPsPSSRM |
| 1175 | RAPsPSSRV |
| 1176 | RARGIsPIVF |
| 1177 | RASsDIVsL |
| 1178 | RASsDIVSL |
| 1179 | RASsLSITV |
| 1180 | REAPsPLmI |
| 1181 | REAPsPLMI |
| 1182 | REAsPAPLA |
| 1183 | REAsPRLRV |
| 1184 | REAsPSRLSV |
| 1185 | REDsTPGKVFL |
| 1186 | REIMGtPEYL |
| 1187 | REKsPGRmL |
| 1188 | REKsPGRML |
| 1189 | REKsPLFQF |
| 1190 | REKsPLFQW |
| 1191 | REKsPLFQY |
| 1192 | RELARKGsL |
| 1193 | RELsPLISL |
| 1194 | REPsPLPEL |
| 1195 | RERsPSPSF |
| 1196 | RESsPTRRL |
| 1197 | REVsPAPAV |
| 1198 | REYGsTSSI |
| 1199 | RFKtQPVTF |
| 1200 | RGDGYGtF |
| 1201 | RGDsPKIDL |
| 1202 | RIDsKDSASEL |
| 1203 | RIGsPLSPK |
| 1204 | RILsGVVTK |
| 1205 | RILsGVVTY |
| 1206 | RILsPSMASK |
| 1207 | RILsPSMASY |
| 1208 | RINsFEEHV |
| 1209 | RIQsKLYRA |
| 1210 | RIQyIQSRF |
| 1211 | RIQyIQSRFY |
| 1212 | RIsHELDS |
| 1213 | RITsLIVHV |
| 1214 | RIVQyIQSR |
| 1215 | RIYQyIQ |
| 1216 | RIYQyIQSK |
| 1217 | RIYQyIQSR |
| 1218 | RIYQyIQSRF |
| 1219 | RIYQyIQSRFK |
| 1220 | RIYQyIQSRFY |
| 1221 | RIYQyIQSRK |
| 1222 | RIYQyIQSRY |
| 1223 | RIYQyIQSY |
| 1224 | RIYQyLQSRF |
| 1225 | RIYQyLQSRFY |
| 1226 | RKLRsLEQL |
| 1227 | RKLsVILIK |
| 1228 | RKLsVILIL |
| 1229 | RKLsVILIY |
| 1230 | RKPsIVTKY |
| 1231 | RKSsIIIRM |
| 1232 | RLAsASRAL |
| 1233 | RLAsFAVRK |
| 1234 | RLAsFAVRY |
| 1235 | RLAsIELPSM |
| 1236 | RLAsIELPSMAV |
| 1237 | RLAsIELPSV |
| 1238 | RLAsLNAEAL |
| 1239 | RLAsLNAEAV |
| 1240 | RLAsLQSEV |
| 1241 | RLAsLSISV |
| 1242 | RLAsPLVHK |
| 1243 | RLAsPLVHY |
| 1244 | RLAsPPPPPK |
| 1245 | RLAsPPPPPY |
| 1246 | RLAsPTSGV |
| 1247 | RLAsPTSGVK |
| 1248 | RLAsPTSGVKK |
| 1249 | RLAsPTSGVKR |
| 1250 | RLAsPTSGVKY |
| 1251 | RLAsRPLLL |
| 1252 | RLAsSATQVHK |
| 1253 | RLAsYLDKV |
| 1254 | RLAsYLDRV |
| 1255 | RLDsTPGKVFL |
| 1256 | RLDsTPGKVFV |
| 1257 | RLDsYLRAP |
| 1258 | RLDsYVR |
| 1259 | RLDsYVRS |
| 1260 | RLDsYVRSL |
| 1261 | RLDsYVRSV |
| 1262 | RLDtGPQSL |
| 1263 | RLEsANRRL |
| 1264 | RLFsFSKTPK |
| 1265 | RLFsKEL |
| 1266 | RLFsKELR |
| 1267 | RLFsKELRC |
| 1268 | RLFsKELRV |
| 1269 | RLFSLsNPSL |
| 1270 | RLFsPTYGL |
| 1271 | RLFsPTYGV |
| 1272 | RLFsQGQDV |
| 1273 | RLFVGsIPK |
| 1274 | RLGsFHELLL |
| 1275 | RLIsFKAEV |
| 1276 | RLIsPYKKK |
| 1277 | RLIsQDVKL |
| 1278 | RLIsQDVKV |
| 1279 | RLKLPsGSK |
| 1280 | RLKLPsGSKK |
| 1281 | RLKLPsGSKY |
| 1282 | RLKsDERPVHI |
| 1283 | RLKsPFRKK |
| 1284 | RLKsPGsGHVK |
| 1285 | RLKsPISLK |
| 1286 | RLKsPISLY |
| 1287 | RLKsPSPKSEK |
| 1288 | RLKsPSPKSER |
| 1289 | RLKtPTSQSYK |
| 1290 | RLKtPTSQSYR |
| 1291 | RLKTtPLRK |
| 1292 | RLKTtPLRR |
| 1293 | RLLDPsSPLAL |
| 1294 | RLLDPSsPLAL |
| 1295 | RLLDRSPsRSAK |
| 1296 | RLLDRSPsRSAY |
| 1297 | RLLsDGQQIIL |
| 1298 | RLLsDLEEL |
| 1299 | RLLsDQTRL |
| 1300 | RLLsFQRYL |
| 1301 | RLLsGVVTK |
| 1302 | RLLsGVVTY |
| 1303 | RLLsHISEA |
| 1304 | RLLsHISEV |
| 1305 | RLLsPLSSA |
| 1306 | RLLsPLSSARL |
| 1307 | RLLsPLSSV |
| 1308 | RLLsPQQPAL |
| 1309 | RLLsPRPSL |
| 1310 | RLLsPRPSLL |
| 1311 | RLLsPSMASK |
| 1312 | RLLsSGVSEI |
| 1313 | RLLsSGVSEV |
| 1314 | RLLsTDAEAV |
| 1315 | RLLsVEIVK |
| 1316 | RLLsVEIVY |
| 1317 | RLLsVHDFDF |
| 1318 | RLLsVILIK |
| 1319 | RLMsMPVAK |
| 1320 | RLMsMPVAY |
| 1321 | RLNtSDFQKL |
| 1322 | RLPNRIPsL |
| 1323 | RLPsFLKKNK |
| 1324 | RLPsLVHGY |
| 1325 | RLPsSTLKK |
| 1326 | RLPsSTLKR |
| 1327 | RLPsSTLKY |
| 1328 | RLQsLIKNI |
| 1329 | RLQsTSERL |
| 1330 | RLQsTSERV |
| 1331 | RLR(sLss)PTVTL |
| 1332 | RLR(sLss)PTVTV |
| 1333 | RLRQsPLATK |
| 1334 | RLRQsPLATR |
| 1335 | RLRQsPLATY |
| 1336 | RLRRsPLLK |
| 1337 | RLRsAGAAQK |
| 1338 | RLRsLSSLREK |
| 1339 | RLRsPPPVSK |
| 1340 | RLRsYEDMI |
| 1341 | RLRTsPITRK |
| 1342 | RLRTsPITRR |
| 1343 | RLSDtPPLL |
| 1344 | RLSsLIRHK |
| 1345 | RLSsLRASTSK |
| 1346 | RLSsPISKK |
| 1347 | RLSsPISKR |
| 1348 | RLSsPISKY |
| 1349 | RLsSPLHFV |
| 1350 | RLSsPLHFV |
| 1351 | RLSsPVLHK |
| 1352 | RLSsPVLHR |
| 1353 | RLSsPVLHY |
| 1354 | RLSsRFSSK |
| 1355 | RLSsRFSSR |
| 1356 | RLSsRFSSY |
| 1357 | RLSsRYSQK |
| 1358 | RLSsRYSQY |
| 1359 | RLSsVKLISK |
| 1360 | RLSsVKLISY |
| 1361 | RLTFsPTYGV |
| 1362 | RLVsLSMRK |
| 1363 | RLVsLSMRY |
| 1364 | RLYKsPLRH |
| 1365 | RLYKsPLRK |
| 1366 | RLYQyIQSK |
| 1367 | RLYQyIQSR |
| 1368 | RLYQyIQSRFK |
| 1369 | RLYQyIQSRFY |
| 1370 | RLYQyIQSY |
| 1371 | RLYQylOSK |
| 1372 | RLYQyLQSRF |
| 1373 | RLYQyLQSRFK |
| 1374 | RLYQyLQSRFY |
| 1375 | RLYQyLQSRK |
| 1376 | RLYsGPMNKV |
| 1377 | RLYsGSRsK |
| 1378 | RLYsGSRsR |
| 1379 | RLYsGSRsY |
| 1380 | RLYsKSRDK |
| 1381 | RLYsPDHRQK |
| 1382 | RLYsPERSK |
| 1383 | RLYsPRNSK |
| 1384 | RLYsPYNHK |
| 1385 | RLYsPYNHR |
| 1386 | RLYsPYNHY |
| 1387 | RLYSRsFSK |
| 1388 | RLYSRsFSY |
| 1389 | RLYsYPRQK |
| 1390 | RLYVTTSTRTYsLG |
| 1391 | RLYVTTSTRTYsLK |
| 1392 | RLYVTTSTRTYsLY |
| 1393 | RMAsPPPPPK |
| 1394 | RMAsPTSGV |
| 1395 | RMAsPTSGVK |
| 1396 | RMAsPTSGVKK |
| 1397 | RMAsPTSGVKR |
| 1398 | RMAsPTSGVKY |
| 1399 | RMAsSATQVHK |
| 1400 | RMDsTPGKVFL |
| 1401 | RMDsTPGKVFV |
| 1402 | RMDsYVRSL |
| 1403 | RMDsYVRSV |
| 1404 | RMFPtPPSL |
| 1405 | RMFsFSKTPK |
| 1406 | RMFsKELRC |
| 1407 | RMFsKELRV |
| 1408 | RMFsPMEEK |
| 1409 | RMFsPMEEKELL |
| 1410 | RMFsPTYGL |
| 1411 | RMFsPTYGV |
| 1412 | RMIsPYKKK |
| 1413 | RMIsQDVKL |
| 1414 | RMIsQDVKV |
| 1415 | RMIsTGSEL |
| 1416 | RMKLPsGSK |
| 1417 | RMKLPsGSKK |
| 1418 | RMKLPsGSKY |
| 1419 | RMKsPFRKK |
| 1420 | RMKsPGsGHVK |
| 1421 | RMKsPSPKSEK |
| 1422 | RMKtPTSQSYK |
| 1423 | RMKtPTSQSYR |
| 1424 | RMKTtPLRK |
| 1425 | RMKTtPLRR |
| 1426 | RMLDRSPsRSAK |
| 1427 | RMLDRSPsRSAY |
| 1428 | RMLsHISEA |
| 1429 | RMLsHISEV |
| 1430 | RMLsLRDQRL |
| 1431 | RMLsPLSSA |
| 1432 | RMLsPLSSV |
| 1433 | RMLsPSMASK |
| 1434 | RMLsSGVSEI |
| 1435 | RMLsSGVSEV |
| 1436 | RMLsVILIK |
| 1437 | RMPsFLKKNK |
| 1438 | RMPsSTLKK |
| 1439 | RMPsSTLKR |
| 1440 | RMQsTSERL |
| 1441 | RMQsTSERV |
| 1442 | RMRQsPLATK |
| 1443 | RMRQsPLATR |
| 1444 | RMRRsPLLK |
| 1445 | RMRsAGAAQK |
| 1446 | RMRsLSSLREK |
| 1447 | RMRsPPPVSK |
| 1448 | RMRTsPITRK |
| 1449 | RMRTsPITRR |
| 1450 | RMSsLIRHK |
| 1451 | RMSsPISKK |
| 1452 | RMSsPISKR |
| 1453 | RMSsPLHFV |
| 1454 | RMSsPVLHK |
| 1455 | RMSsRYSQK |
| 1456 | RMSsVKLISK |
| 1457 | RMGsVKLISY |
| 1458 | RMVsLSMRK |
| 1459 | RMVsLSMRY |
| 1460 | RMYKsPLRH |
| 1461 | RMYKsPLRK |
| 1462 | RMYQyIQSK |
| 1463 | RMYQyIQSR |
| 1464 | RMYQyLQSRF |
| 1465 | RMYQyLQSRFK |
| 1466 | RMYQyLQSRFY |
| 1467 | RMYQyLQSRK |
| 1468 | RMYsFDDVL |
| 1469 | RMYsGSRsK |
| 1470 | RMYsGSRsR |
| 1471 | RMYsKSRDH |
| 1472 | RMYsKSRDK |
| 1473 | RMYsKSRDY |
| 1474 | RMYsPDHRQK |
| 1475 | RMYsPERSK |
| 1476 | RMYsPIIYQA |
| 1477 | RMYsPIPPSL |
| 1478 | RMYsPRNSK |
| 1479 | RMYsPYNHK |
| 1480 | RMYsPYNHR |
| 1481 | RMYsYPRQK |
| 1482 | RMYVTTSTRTYsLG |
| 1483 | RMYVTTSTRTYsLK |
| 1484 | RMYVTTSTRTYsLY |
| 1485 | RNLsSPFIF |
| 1486 | RPAFFsPSL |
| 1487 | RPAKsMDSF |
| 1488 | RPAKsMDSL |
| 1489 | RPAKsMDSM |
| 1490 | RPAKsMDV |
| 1491 | RPAsAGAMF |
| 1492 | RPAsAGAmL |
| 1493 | RPAsAGAML |
| 1494 | RPAsAGAMM |
| 1495 | RPAsAGAMV |
| 1496 | RPAsARAQPGF |
| 1497 | RPAsARAQPGL |
| 1498 | RPAsARAQPGM |
| 1499 | RPAsARAQPGV |
| 1500 | RPAsEARAPGL |
| 1501 | RPAsPAAKF |
| 1502 | RPAsPAAKL |
| 1503 | RPAsPAAKM |
| 1504 | RPAsPAAKV |
| 1505 | RPAsPEPEL |
| 1506 | RPAsPGPSL |
| 1507 | RPAsPKRAKI |
| 1508 | RPAsPKRAKL |
| 1509 | RPAsPKRAKX |
| 1510 | RPAsPKRAQI |
| 1511 | RPAsPKRAQL |
| 1512 | RPAsPKRAQX |
| 1513 | RPAsPQRAKI |
| 1514 | RPAsPQRAKL |
| 1515 | RPAsPQRAKX |
| 1516 | RPAsPQRAQI |
| 1517 | RPAsPQRAQL |
| 1518 | RPAsPQRAQX |
| 1519 | RPAsPSLQL |
| 1520 | RPAsPSLQLL |
| 1521 | RPAsPtAIRRTGSVTSRQT |
| 1522 | RPAsRFEVL |
| 1523 | RPAsYKKKSML |
| 1524 | RPAtGGPGVA |
| 1525 | RPAtGGPGVF |
| 1526 | RPAtGGPGVL |
| 1527 | RPAtGGPGVM |
| 1528 | RPAtGGPGVV |
| 1529 | RPAtPTSQF |
| 1530 | RPAtPTSQL |
| 1531 | KPAtPTSQM |
| 1532 | RPAtPTSQV |
| 1533 | RPDsAHKML |
| 1534 | RPDsPTRPTL |
| 1535 | RPDsRLGKTEF |
| 1536 | RPDsRLGKTEL |
| 1537 | RPDsRLGKTEM |
| 1538 | RPDsRLGKTEV |
| 1539 | RPDVAKRLsL |
| 1540 | RPEsDSGLKF |
| 1541 | RPEsDSGLKL |
| 1542 | RPEsDSGLKM |
| 1543 | RPEsDSGLKV |
| 1544 | RPEsKDRKF |
| 1545 | RPEsKDRKL |
| 1546 | RPEsKDRKM |
| 1547 | RPEsKDRKV |
| 1548 | RPFARsHSF |
| 1549 | RPFARSHsF |
| 1550 | RPFHGISTVsL |
| 1551 | RPFsPREAF |
| 1552 | RPFsPREAL |
| 1553 | RPFsPREAM |
| 1554 | RPFsPREAV |
| 1555 | RPGsLERKF |
| 1556 | RPGsLERKL |
| 1557 | RPGsLERKM |
| 1558 | RPGsLERKV |
| 1559 | RPGsRQAGL |
| 1560 | RPGsRqAGL |
| 1561 | RPHsPEKAF |
| 1562 | RPHsPEKAL |
| 1563 | RPHsPEKAM |
| 1564 | RPHsPEKAV |
| 1565 | RPHtPTGIYM |
| 1566 | RPHtPTPGIYM |
| 1567 | RPIsPGLSF |
| 1568 | RPIsPGLSL |
| 1569 | RPIsPGLSM |
| 1570 | RPIsPGLSV |
| 1571 | RPIsPGLSY |
| 1572 | RPIsPPHTY |
| 1573 | RPIsPRIGAL |
| 1574 | RPItPPRNSA |
| 1575 | RPItPPRNSF |
| 1576 | RPItPPRNSL |
| 1577 | RPItPPRNSM |
| 1578 | RPItPPRNSV |
| 1579 | RPKLSsPAF |
| 1580 | RPKLSsPAL |
| 1581 | RPKLSsPAM |
| 1582 | RPKLSsPAV |
| 1583 | RPKPSSsPF |
| 1584 | RPKPSSsPL |
| 1585 | RPKPSSsPM |
| 1586 | RPKPSSsPV |
| 1587 | RPKsNIVLF |
| 1588 | RPKsNIVLL |
| 1589 | RPKsNIVLM |
| 1590 | RPKsNIVLV |
| 1591 | RPKsPLSKm |
| 1592 | RPKsPLSKM |
| 1593 | RPKsQVAEF |
| 1594 | RPKsQVAEL |
| 1595 | RPKsQVAEM |
| 1596 | RPKsQVAEV |
| 1597 | RPKsVDFDSL |
| 1598 | RPKtPPVVI |
| 1599 | RPLsLLLAL |
| 1600 | RPLsPGGAF |
| 1601 | RPLsPGGAL |
| 1602 | RPLsPGGAM |
| 1603 | RPLsPGGAV |
| 1604 | RPLsPLLF |
| 1605 | RPLsPLLL |
| 1606 | RPLsPLLM |
| 1607 | RPLsPLLV |
| 1608 | RPLsYVL |
| 1609 | RPMsESPHM |
| 1610 | RPNsPSPTAF |
| 1611 | RPNsPSPTAL |
| 1612 | RPNsPSPTAM |
| 1613 | RPNsPSPTAV |
| 1614 | RPPIgTQSSL |
| 1615 | RPPPPPDtPF |
| 1616 | RPPPPPDtPL |
| 1617 | RPPPPPDtPM |
| 1618 | RPPPPPDtPP |
| 1619 | RPPPPPDtPV |
| 1620 | RPPsPGPVF |
| 1621 | RPPsPGPVL |
| 1622 | RPPsPGPVM |
| 1623 | RPPsPGPVV |
| 1624 | RPPsPSSRF |
| 1625 | RPPsPSSRL |
| 1626 | RPPsPSSRM |
| 1627 | RPPsPSSRV |
| 1628 | RPPsSEFLDF |
| 1629 | RPPsSEFLDL |
| 1630 | RPPsSEFLDM |
| 1631 | RPPsSEFLDV |
| 1632 | RPQKTQsII |
| 1633 | RPQRAtSNVF |
| 1634 | RPQRATsNVF |
| 1635 | RPQRAtSNVL |
| 1636 | RPQRATsNVL |
| 1637 | RPQRAtSNVM |
| 1638 | RPQRATsNVM |
| 1639 | RPQRAtSNVV |
| 1640 | RPQRATsNVV |
| 1641 | RPR(sLss)PTVTL |
| 1642 | RPR(sLss)PTVTV |
| 1643 | RPRAAtVV |
| 1644 | RPRAAtVVA |
| 1645 | RPRAAtW |
| 1646 | RPRAAtWA |
| 1647 | RPRANsGGVDF |
| 1648 | RPRANsGGVDL |
| 1649 | RPRANsGGVDM |
| 1650 | RPRANsGGVDV |
| 1651 | RPRARsVDAL |
| 1652 | RPRDtRRISL |
| 1653 | RPRGsESLL |
| 1654 | RPRGsQSLF |
| 1655 | RPRGsQSLL |
| 1656 | RPRGsQSLM |
| 1657 | RPRGsQSLV |
| 1658 | RPRIPsPIGF |
| 1659 | RPRLSsTNSSRF |
| 1660 | RPRPAsSPAL |
| 1661 | RPRPHsAPSF |
| 1662 | RPRPHsAPSL |
| 1663 | RPRPHsAPSM |
| 1664 | RPRPHsAPSV |
| 1665 | RPRPSsAHVGL |
| 1666 | RPRPsSVL |
| 1667 | RPRPsSVLRTL |
| 1668 | RPRPVsPSSF |
| 1669 | RPRPVsPSSL |
| 1670 | RPRPVsPSSLL |
| 1671 | RPRPVsPSSM |
| 1672 | RPRPVsPSSV |
| 1673 | RPRRsSTQF |
| 1674 | RPRRsSTQL |
| 1675 | RPRRsSTQM |
| 1676 | RPRRsSTQV |
| 1677 | RPRsAVEQL |
| 1678 | RPRsAVLF |
| 1679 | RPRsAVLL |
| 1680 | RPRsAVLM |
| 1681 | RPRsAVLV |
| 1682 | RPRSGsTGSSL |
| 1683 | RPRsISVEEF |
| 1684 | RPRsISVEEL |
| 1685 | RPRsISVEEM |
| 1686 | RPRsISVEEV |
| 1687 | RPRsLEVTF |
| 1688 | RPRsLEVTI |
| 1689 | RPRsLEVTL |
| 1690 | RPRsLEVTM |
| 1691 | RPRsLEVTV |
| 1692 | RPRSLsSPTV |
| 1693 | RPRSLsSPTVTF |
| 1694 | RPRSLsSPTVTL |
| 1695 | RPRSLsSPTVTM |
| 1696 | RPRSLsSPTVTV |
| 1697 | RPRsMTVSA |
| 1698 | RPRsMVRSF |
| 1699 | RPRsPAARF |
| 1700 | RPRsPAARL |
| 1701 | RPRsPAARM |
| 1702 | RPRsPAARV |
| 1703 | RPRsPGSNSKV |
| 1704 | RPRsPNMQDL |
| 1705 | RPRsPPGGP |
| 1706 | RPRsPPPRAF |
| 1707 | RPRsPPPRAL |
| 1708 | RPRsPPPRAM |
| 1709 | RPRsPPPRAP |
| 1710 | RPRsPPPRAV |
| 1711 | RPRsPPSSP |
| 1712 | RPRsPRENSF |
| 1713 | RPRsPRENSI |
| 1714 | RPRsPRENSL |
| 1715 | RPRsPRENSM |
| 1716 | RPRsPRENSV |
| 1717 | RPRsPRPPP |
| 1718 | RPRsPRQNLI |
| 1719 | RPRsPRQNSF |
| 1720 | RPRsPRQNSI |
| 1721 | RPRsPRQNSM |
| 1722 | RPRsPRQNSV |
| 1723 | RPRsPSPIF |
| 1724 | RPRsPSPIL |
| 1725 | RPRsPSPIM |
| 1726 | RPRsPSPIS |
| 1727 | RPRSPsPIS |
| 1728 | RPRsPSPIV |
| 1729 | RPRsPTGF |
| 1730 | RPRsPTGL |
| 1731 | RPRsPTGM |
| 1732 | RPRsPTGP |
| 1733 | RPRsPTGPsNSF |
| 1734 | RPRsPTGPSNSF |
| 1735 | RPRsPTGPSNSFL |
| 1736 | RPRsPTGPsNSL |
| 1737 | RPRsPTGPsNSM |
| 1738 | RPRsPTGPsNSV |
| 1739 | RPRsPTGV |
| 1740 | RPRsPTRSF |
| 1741 | RPRsPTRSL |
| 1742 | RPRsPTRSM |
| 1743 | RPRsPTRSV |
| 1744 | RPRsPWGKL |
| 1745 | RPRsQYNTKL |
| 1746 | RPRSTsQSIVSL |
| 1747 | RPRtPLRSL |
| 1748 | RPSGRREsF |
| 1749 | RPSGRREsL |
| 1750 | RPSGRREsM |
| 1751 | RPSGRREsV |
| 1752 | RPsNPQL |
| 1753 | RPSRSsPGF |
| 1754 | RPSRSsPGL |
| 1755 | RPSRSsPGM |
| 1756 | RPSRSsPGV |
| 1757 | RPSsGFYEL |
| 1758 | RPSsLDAEIDSF |
| 1759 | RPSsLDAEIDSL |
| 1760 | RPSsLDAEIDSM |
| 1761 | RPSsLDAEIDSV |
| 1762 | RPSsLPDF |
| 1763 | RPSsLPDL |
| 1764 | RPSsLPDM |
| 1765 | RPSsLPDV |
| 1766 | RPsSPALYF |
| 1767 | RPSsPALYF |
| 1768 | RPsSPALYL |
| 1769 | RPsSPALYM |
| 1770 | RPsSPALYV |
| 1771 | RPStPKSDSEF |
| 1772 | RPStPKSDSEL |
| 1773 | RPSLPKSDSEM |
| 1774 | RPStPKSDSEV |
| 1775 | RPTKIGRRsL |
| 1776 | RPTsFADEL |
| 1777 | RPTsPIQIM |
| 1778 | RPTsRLNRF |
| 1779 | RPTsRLNRL |
| 1780 | RPTsRLNRM |
| 1781 | RPTsRLNRV |
| 1782 | RPVsPFQEF |
| 1783 | RPVsPFQEL |
| 1784 | RPVsPFQEM |
| 1785 | RPVsPFQEV |
| 1786 | RPVsPGKDF |
| 1787 | RPVsPGKDI |
| 1788 | RPVsPGKDL |
| 1789 | RPVsPGKDM |
| 1790 | RPVsPGKDV |
| 1791 | RPVSPsSLL |
| 1792 | RPVsTDFAQY |
| 1793 | RPVtPVSDF |
| 1794 | RPVtPVSDL |
| 1795 | RPVtPVSDM |
| 1796 | RPVtPVSDV |
| 1797 | RPWsNSRGL |
| 1798 | RPWsPAVSA |
| 1799 | RPWsPAVSF |
| 1800 | RPWsPAVSL |
| 1801 | RPWsPAVSM |
| 1802 | RPWsPAVSV |
| 1803 | RPYsPPFFSF |
| 1804 | RPYsPPFFSL |
| 1805 | RPYsPPFFSM |
| 1806 | RPYsPPFFSV |
| 1807 | RPYSPsQAL |
| 1808 | RPYsPSQYAL |
| 1809 | RPYSPsQYAL |
| 1810 | RPYsQVNVL |
| 1811 | RQAsIELPSM |
| 1812 | RQAsIELPSMAV |
| 1813 | RQAsIELPSV |
| 1814 | RQAsLSISV |
| 1815 | RQAsPLVHK |
| 1816 | RQAsPLVIIR |
| 1817 | RQAsPLVHY |
| 1818 | RQDsTPGKVFL |
| 1819 | RQDStPGKVFL |
| 1820 | RQDsTPGKVFV |
| 1821 | RQIsFKAEV |
| 1822 | RQIsQDVKL |
| 1823 | RQIsQDVKV |
| 1824 | RQKsPLFQF |
| 1825 | RQLsALHRA |
| 1826 | RQLsLEGSGLGV |
| 1827 | RQLsSGVSEI |
| 1828 | RQLsSGVSEV |
| 1829 | RQSsSRFNL |
| 1830 | RRAsFAKSF |
| 1831 | RRAsFAKSK |
| 1832 | RRAsFAKSL |
| 1833 | RRAsFAKSM |
| 1834 | RRAsFAKSR |
| 1835 | RRAsIITKY |
| 1836 | RRAsLSEIGF |
| 1837 | RRAsLSEIGK |
| 1838 | RRAsLSEIGY |
| 1839 | RRAsQEANL |
| 1840 | RRASsPFRF |
| 1841 | RRASsPFRK |
| 1842 | RRASsPFRL |
| 1843 | RRASsPFRM |
| 1844 | RRASsPFRR |
| 1845 | RRAsVFVKF |
| 1846 | RRAsVFVKK |
| 1847 | RRAsVFVKL |
| 1848 | RRAsVFVKM |
| 1849 | RRAsVFVKR |
| 1850 | RRDsIVAEF |
| 1851 | RRDsIVAEK |
| 1852 | RRDsIVAEL |
| 1853 | RRDsIVAER |
| 1854 | RRDsIVAEY |
| 1855 | RRDsLQKPGL |
| 1856 | RRFsFEVTL |
| 1857 | RRFsFKF |
| 1858 | RRFsFKK |
| 1859 | RRFsFKKSF |
| 1860 | RRFsFKKSK |
| 1861 | RRFsFKKSL |
| 1862 | RRFsFKKSM |
| 1863 | RRFsFKKSR |
| 1864 | RRFsFKL |
| 1865 | RRFsFKM |
| 1866 | RRFsFKR |
| 1867 | RRFsGTAVY |
| 1868 | RRFsGTVRF |
| 1869 | RRFsGTVRK |
| 1870 | RRFsGTVRL |
| 1871 | RRFsGTVRM |
| 1872 | RRFsGTVRR |
| 1873 | RRFsIATLR |
| 1874 | RRFsLTTLR |
| 1875 | RRFsPDDKYSF |
| 1876 | RRFsPDDKYSK |
| 1877 | RRFsPDDKYSL |
| 1878 | RRFsPDDKYSM |
| 1879 | RRFsPPRRF |
| 1880 | RRFsPPRRK |
| 1881 | RRFsPPRRL |
| 1882 | RRFsPPRRm |
| 1883 | RRFsPPRRM |
| 1884 | RRFsPPRRR |
| 1885 | RRFsPPRRY |
| 1886 | RRFsRLENRY |
| 1887 | RRFsRSDEL |
| 1888 | RRFsRsPIF |
| 1889 | RRFsRSPIF |
| 1890 | RRFsRsPIK |
| 1891 | RRFsRSPIK |
| 1892 | RRFsRsPIL |
| 1893 | RRFsRSPIL |
| 1894 | RRFsRSPIM |
| 1895 | RRFsRsPIR |
| 1896 | RRFsRGPIR |
| 1897 | RRFSRsPIR |
| 1898 | RRFsRsPIRF |
| 1899 | RRFsRSPIRF |
| 1900 | RRFsRsPIRK |
| 1901 | RRFsRSPIRK |
| 1902 | RRFsRsPIRL |
| 1903 | RRFsRSPIRL |
| 1904 | RRFsRsPIRR |
| 1905 | RRFsRSPIRR |
| 1906 | RRFsRsPIRY |
| 1907 | RRFsRSPIRY |
| 1908 | RRFsRsPIY |
| 1909 | RRFsRSPIY |
| 1910 | RRFsRSPK |
| 1911 | RRFSsPPRRM |
| 1912 | RRFsVSTLR |
| 1913 | RRFsVTTMR |
| 1914 | RRFtPPSPAF |
| 1915 | RRFtPPSPAK |
| 1916 | RRFtPPSPAR |
| 1917 | RRFtPPSPAY |
| 1918 | RRGsFEVTL |
| 1919 | RRHsASNLHAL |
| 1920 | RRIDIsPSTF |
| 1921 | RRIDIsPSTK |
| 1922 | RRIDIsPSTLR |
| 1923 | RRIDIsPSTLRK |
| 1924 | RRIDIsPSTR |
| 1925 | RRIDIsPSTY |
| 1926 | RRIsDPEVF |
| 1927 | RRIsDPQVF |
| 1928 | RRIsGVDRF |
| 1929 | RRIsGVDRK |
| 1930 | RRIsGVDRL |
| 1931 | RRIsGVDRM |
| 1932 | RRIsGVDRR |
| 1933 | RRIsGVDRY |
| 1934 | RRIsGVDRYF |
| 1935 | RRIsGVDRYK |
| 1936 | RRIsGVDRYL |
| 1937 | RRIsGVDRYR |
| 1938 | RRIsGVDRYY |
| 1939 | RRIsPAPQR |
| 1940 | RRIsQIQQL |
| 1941 | RRKsOVAEF |
| 1942 | RRKsOVAEK |
| 1943 | RRKsPPPSF |
| 1944 | RRKsPPPSK |
| 1945 | RRKsPPPSL |
| 1946 | RRKsPPPSM |
| 1947 | RRKsPPPSR |
| 1948 | RRKsQLDSF |
| 1949 | RRKsQLDSK |
| 1950 | RRKsQLDSL |
| 1951 | RRKsQLDSM |
| 1952 | RRKsQLDSR |
| 1953 | RRKsQLDSY |
| 1954 | RRKsQVAEF |
| 1955 | RRKsQVAEK |
| 1956 | RRKsQVAEL |
| 1957 | RRKsQVAEM |
| 1958 | RRKsQVAER |
| 1959 | RRKsQVAEV |
| 1960 | RRKsQVAEY |
| 1961 | RRLGsPHRF |
| 1962 | RRLGsPHRK |
| 1963 | RRLGsPHRL |
| 1964 | RRLGsPHRM |
| 1965 | RRLGsPHRR |
| 1966 | RRLsADIRF |
| 1967 | RRLsADIRK |
| 1968 | RRLsADIRL |
| 1969 | RRLsADIRM |
| 1970 | RRLsADIRR |
| 1971 | RRLsADIRY |
| 1972 | RRLsDSPVF |
| 1973 | RRLsELLRY |
| 1974 | RRLsERETR |
| 1975 | RRLsESSAL |
| 1976 | RRLsFLVSF |
| 1977 | RRLsFLVSK |
| 1978 | RRLsFLVSL |
| 1979 | RRLsFLVSM |
| 1980 | RRLsFLVSR |
| 1981 | RRLsFLVSY |
| 1982 | RRLsGGSHSF |
| 1983 | RRLsGGSHSK |
| 1984 | RRLsGGSHSL |
| 1985 | RRLsGGSHSM |
| 1986 | RRLsGGSHSR |
| 1987 | RRLsGGSHSY |
| 1988 | RRLsGPLHTF |
| 1989 | RRLsGPLHTK |
| 1990 | RRLsGPLHTL |
| 1991 | RRLsGPLHTM |
| 1992 | RRLsGPLHTR |
| 1993 | RRLsGPLHTV |
| 1994 | RRLsGPLHTY |
| 1995 | RRLsLFLNV |
| 1996 | RRLsNLPTF |
| 1997 | RRLsNLPTK |
| 1998 | RRLsNLPTR |
| 1999 | RRLsNLPTV |
| 2000 | RRLsNLPTY |
| 2001 | RRLsPAPCF |
| 2002 | RRLsPAPQK |
| 2003 | RRLsPAPQL |
| 2004 | RRLsPAPQM |
| 2005 | RRLsPKASQVF |
| 2006 | RRLs PKASQVK |
| 2007 | RRLsPKASQVL |
| 2008 | RRLsPKASQVM |
| 2009 | RRLsPKASQVR |
| 2010 | RRLsPVPVPF |
| 2011 | RRLsPVPVPK |
| 2012 | RRLsPVPVPL |
| 2013 | RRLsPVPVPM |
| 2014 | RRLsPVPVPR |
| 2015 | RRLsRELCK |
| 2016 | RRLsRELQF |
| 2017 | RRLsRELQL |
| 2018 | RRLsRELQM |
| 2019 | RRLsRELQR |
| 2020 | RRLsRKLSL |
| 2021 | RRLsVERIF |
| 2022 | RRLsVERIK |
| 2023 | RRLsVERIM |
| 2024 | RRLsVERIR |
| 2025 | RRLsYVLFI |
| 2026 | RRLTHLsF |
| 2027 | RRLTHLsK |
| 2028 | RRLTHLsL |
| 2029 | RRLTHLsM |
| 2030 | RRLTHLsR |
| 2031 | RRMsFQKP |
| 2032 | RRMsLLSVF |
| 2033 | RRMsLLSVK |
| 2034 | RRMsLLSVL |
| 2035 | RRMsLLSVM |
| 2036 | RRMsLLSVR |
| 2037 | RRmsLLSVV |
| 2038 | RRMsLLSVV |
| 2039 | RRMsLLSVY |
| 2040 | RRMsLLSW |
| 2041 | RRMsLSVM |
| 2042 | RRMsPIKPL |
| 2043 | RRMsPKAOR |
| 2044 | RRMsPKAQF |
| 2045 | RRMsPKAQK |
| 2046 | RRMsPKAQL |
| 2047 | RRMsPKAQM |
| 2048 | RRMsPKPF |
| 2049 | RRMsPKPK |
| 2050 | RRMsPKPM |
| 2051 | RRMsPKPR |
| 2052 | RRNsAPVSV |
| 2053 | RRNsINRNF |
| 2054 | RRNsNPVIAEF |
| 2055 | RRNsNPVIAEK |
| 2056 | RRNsNPVIAEL |
| 2057 | RRNsNPVIAEM |
| 2058 | RRNsNPVIAER |
| 2059 | RRNsSERTF |
| 2060 | RRNsSERTK |
| 2061 | RRNsSERTL |
| 2062 | RRNsSERTM |
| 2063 | RRNsSERTR |
| 2064 | RRNsSERTY |
| 2065 | RRNsSIVGF |
| 2066 | RRNsSIVGK |
| 2067 | RRNsSIVGL |
| 2068 | RRNsSIVGM |
| 2069 | RRNsSIVGR |
| 2070 | RRNsSIVGY |
| 2071 | RRNsVFQQGF |
| 2072 | RRNsVFQQGK |
| 2073 | RRNsVFQQGL |
| 2074 | RRNsVFQQGM |
| 2075 | RRNsVFQQGR |
| 2076 | RRNsVFQQGY |
| 2077 | RRPsIAPVL |
| 2078 | RRPsLLSEF |
| 2079 | RRPsLVHGF |
| 2080 | RRPsLVHGK |
| 2081 | RRPsLVHGL |
| 2082 | RRPsLVHGM |
| 2083 | RRPsLVHGR |
| 2084 | RRPsLVHGY |
| 2085 | RRPsVFERF |
| 2086 | RRPsVFERK |
| 2087 | RRPsVFERL |
| 2088 | RRPsVFERM |
| 2089 | RRPsVFERR |
| 2090 | RRPsVFERY |
| 2091 | RRPsYRKIF |
| 2092 | RRPsYRKIK |
| 2093 | RRPsYRKIL |
| 2094 | RRPsYRKIM |
| 2095 | RRPsYRKIR |
| 2096 | RRPsYRKIY |
| 2097 | RRPsYTLGF |
| 2098 | RRPsYTLGK |
| 2099 | RRPsYTLGL |
| 2100 | RRPsYTLGM |
| 2101 | RRPsYTLGR |
| 2102 | RRPsYTLGV |
| 2103 | RRPsYTLGY |
| 2104 | RRCsKVEAL |
| 2105 | RRRsLERLL |
| 2106 | RRsFLVSY |
| 2107 | RRSFsLE |
| 2108 | RRSsFLQ |
| 2109 | RRssFLQLF |
| 2110 | RRssFLQVF |
| 2111 | RRSsFLQVF |
| 2112 | RRSsFLQVK |
| 2113 | RRSsFLQVL |
| 2114 | RRssFLQVM |
| 2115 | RRSsFLQVM |
| 2116 | RRSsFLQVR |
| 2117 | RRssFLQW |
| 2118 | RRSsFLQVY |
| 2119 | RRSsIGLRF |
| 2120 | RRSsIGLRK |
| 2121 | RRSsIGLRL |
| 2122 | RRSsIGLRM |
| 2123 | RRSsIGLRR |
| 2124 | RRSsIGLRV |
| 2125 | RRSsIGLRY |
| 2126 | RRsSIQSTF |
| 2127 | RRSsIQSTF |
| 2128 | RRSsIQSTK |
| 2129 | RRSsIQSTL |
| 2130 | RRSsIQSTM |
| 2131 | RRSsIQSTR |
| 2132 | RRSsIQSTY |
| 2133 | RRSsLDAEIDSF |
| 2134 | RRSsLDAEIDSL |
| 2135 | RRSsLDAEIDSM |
| 2136 | RRGsLDAEIDSV |
| 2137 | RRsSQSWSF |
| 2138 | RRSsQSWSF |
| 2139 | RRSsQSWSK |
| 2140 | RRsSQSWSL |
| 2141 | RRSsQSWSL |
| 2142 | RRsSQSWSM |
| 2143 | RRSsQSWSM |
| 2144 | RRSsQSWSR |
| 2145 | RRsSQSWSV |
| 2146 | RRSsQSWSY |
| 2147 | RRSsSVAQV |
| 2148 | RRSsTASLVKF |
| 2149 | RRSsTASLVKK |
| 2150 | RRSsTASLVKL |
| 2151 | RRSsTASLVKM |
| 2152 | RRSsTASLVKR |
| 2153 | RRsSVDLGF |
| 2154 | RRSsVDLGF |
| 2155 | RRsSVDLGK |
| 2156 | RRSsVDLGK |
| 2157 | RRsSVDLGL |
| 2158 | RRSsVDLGL |
| 2159 | RRsSVDLGM |
| 2160 | RRSsVDLGM |
| 2161 | RRsSVDLGR |
| 2162 | RRSsVDLGR |
| 2163 | RRsSVDLGY |
| 2164 | RRSsVDLGY |
| 2165 | RRSsVKVEA |
| 2166 | RRSsVKVEF |
| 2167 | RRSsVKVEK |
| 2168 | RRSsVKVEL |
| 2169 | RRSsVKVEM |
| 2170 | RRSsVKVER |
| 2171 | RRSsVKVEY |
| 2172 | RRTsPITRF |
| 2173 | RRTsPITRK |
| 2174 | RRTsPITRL |
| 2175 | RRTsPITRM |
| 2176 | RRTsPITRR |
| 2177 | RRWQRSsF |
| 2178 | RRWQRSsK |
| 2179 | RRWQRSsL |
| 2180 | RRWQRSsM |
| 2181 | RRWQRSsR |
| 2182 | RRWQRSsY |
| 2183 | RRWQRSsL |
| 2184 | RRYsGKTEF |
| 2185 | RRYsGKTEK |
| 2186 | RRYsGKTEL |
| 2187 | RRYsGKTER |
| 2188 | RRYsGKTEY |
| 2189 | RRYsGNMEF |
| 2190 | RRYsGNMEK |
| 2191 | RRYsGNMEL |
| 2192 | RRYsGNMEM |
| 2193 | RRYsGNMER |
| 2194 | RRYsKFFDL |
| 2195 | RRYsPPIER |
| 2196 | RRYsPPIQ |
| 2197 | RRYsPPIQF |
| 2198 | RRYsPPIQK |
| 2199 | RRYsPPIQL |
| 2200 | RRYsPPIQM |
| 2201 | RRYsPPIQR |
| 2202 | RRYsPPIQY |
| 2203 | RRYsRsPYSF |
| 2204 | RRYsRSPYSF |
| 2205 | RRYSRsPYSF |
| 2206 | RRYsRsPYSK |
| 2207 | RRYsRSPYSK |
| 2208 | RRYSRsPYSK |
| 2209 | RRYsRsPYSL |
| 2210 | RRYsRSPYSL |
| 2211 | RRYSRsPYSL |
| 2212 | RRYsRsPYSM |
| 2213 | RRYsRSPYSM |
| 2214 | RRYSRsPYSM |
| 2215 | RRYsRsPYSR |
| 2216 | RRYsRSPYSR |
| 2217 | RRYSRsPYSR |
| 2218 | RRYtNRVVTK |
| 2219 | RRYtNRVVTL |
| 2220 | RRYtNRVVTM |
| 2221 | RRYtNRVVTR |
| 2222 | RSAsFSRKV |
| 2223 | RSAsPDDDLGSSN |
| 2224 | RSAsSATQVHK |
| 2225 | RSAsSATQVHY |
| 2226 | RSDPSKsPGSLRY |
| 2227 | RSEsPKIDL |
| 2228 | RSEsPKIDY |
| 2229 | RSEsRAQAV |
| 2230 | RSEsRAQAY |
| 2231 | RSEsVGENL |
| 2232 | RSEsVGENY |
| 2233 | RSEsYVEL |
| 2234 | RSEsYVELSQY |
| 2235 | RSEPSKsPGSLRY |
| 2236 | RSEsKDRKF |
| 2237 | RSEsKDRKL |
| 2238 | RSEsKDRKM |
| 2239 | RSEsKDRKV |
| 2240 | RSEsPKIDL |
| 2241 | RSEsPKIDY |
| 2242 | RSEsPPAEL |
| 2243 | RSEsRAQAV |
| 2244 | RSEsRAQAY |
| 2245 | RSEsVGENL |
| 2246 | RSEsVGENY |
| 2247 | RSEsYVELSQY |
| 2248 | RSFsPTMKV |
| 2249 | RSGsLERKF |
| 2250 | RSGsLERKL |
| 2251 | RSGsLERKM |
| 2252 | RSGsLERKV |
| 2253 | RSHSsPASL |
| 2254 | RSIsVGENL |
| 2255 | RSLsESYEL |
| 2256 | RSLsPGGAA |
| 2257 | RSLsPGGAF |
| 2258 | RSLsPGGAL |
| 2259 | RSLsPGGAM |
| 2260 | RSLsPGGAV |
| 2261 | RSLsPLLF |
| 2262 | RSLsPLLL |
| 2263 | RSLsPLLM |
| 2264 | RSLsPLLV |
| 2265 | RSLsQELVGV |
| 2266 | RSLsVEIVK |
| 2267 | RSLsVEIVY |
| 2268 | RSMsMPVAH |
| 2269 | RSMsMPVAK |
| 2270 | RsPEDEYELLMPHRISSH |
| 2271 | RSRRsPLLK |
| 2272 | RSRRsPLLY |
| 2273 | RSRsPLEL |
| 2274 | RSRsPPPVSK |
| 2275 | RSRsPPPVSY |
| 2276 | RSRsPRPAF |
| 2277 | RSRsPRPAI |
| 2278 | RSRsPRPAL |
| 2279 | RSRsPRPAM |
| 2280 | RSRsPRPAV |
| 2281 | RSRsPRPAX |
| 2282 | RSRTsPITRR |
| 2283 | RSRTsPITRY |
| 2284 | RSSsLIRHK |
| 2285 | RSSsLIRHY |
| 2286 | RSVsLSMRK |
| 2287 | RSVsLSMRY |
| 2288 | RsWKYNQSISLRRP |
| 2289 | RSYsGSRsK |
| 2290 | RSYsGSRsR |
| 2291 | RSYsGSRsY |
| 2292 | RSYsPDHRQK |
| 2293 | RSYsPDHRQY |
| 2294 | RSYsPERSK |
| 2295 | RSYsPERSY |
| 2296 | RSYsPRNSR |
| 2297 | RSYsPRNSY |
| 2298 | RSYSRsFSK |
| 2299 | RSYsRSFSR |
| 2300 | RSYSRsFSR |
| 2301 | RSYSRsFSY |
| 2302 | RSYsYPRQK |
| 2303 | RSYsYPRQY |
| 2304 | RSYVTTSTRTYsLG |
| 2305 | RTAsFAVRK |
| 2306 | RTAsFAVRY |
| 2307 | RTAsLIIKV |
| 2308 | RTAsPPPPPK |
| 2309 | RTDPSKsPGSLRY |
| 2310 | RTDsPKIDL |
| 2311 | RTDsPKIDY |
| 2312 | RTDsRAQAV |
| 2313 | RTDsRAQAY |
| 2314 | RTDsYVELSQY |
| 2315 | RTEPSKsPGSLRY |
| 2316 | RTEsDSGLKF |
| 2317 | RTEsDSGLKK |
| 2318 | RTEsDSGLKL |
| 2319 | RTEsDSGLKM |
| 2320 | RTEsDSGLKV |
| 2321 | RTEsPKIDL |
| 2322 | RTEsPKIDY |
| 2323 | RTEsRAQAV |
| 2324 | RTEsRAQAY |
| 2325 | RTEsYVELSQY |
| 2326 | RTFsLDTIL |
| 2327 | RTFsPTYGF |
| 2328 | RTFsPTYGL |
| 2329 | RTFsPTYGM |
| 2330 | RTFsPTYGV |
| 2331 | RTHsLLLLL |
| 2332 | RTLsHISEA |
| 2333 | RTLsHISEV |
| 2334 | RTLsPEIITV |
| 2335 | RTMsEAALVRK |
| 2336 | RTNsPGFQK |
| 2337 | RTPsDVKEL |
| 2338 | RTPsFLKKNK |
| 2339 | RTPsFLKKNY |
| 2340 | RTRsLSSLREK |
| 2341 | RTRsLSSLREY |
| 2342 | RTRsPSPTF |
| 2343 | RTRsPSPTL |
| 2344 | RTRsPSPTM |
| 2345 | RTRsPSPTV |
| 2346 | RTSsFALNL |
| 2347 | RTSsFTEQL |
| 2348 | RTSsFTFQN |
| 2349 | RTSSFtFQN |
| 2350 | RTSsPLFNK |
| 2351 | RTYKsPLRH |
| 2352 | RTYKsPLRK |
| 2353 | RTYKsPLRY |
| 2354 | RTYsGPMNK |
| 2355 | RTYsGPMNKV |
| 2356 | RTYsHGTYR |
| 2357 | RVAsFAVRK |
| 2358 | RVAsFAVRY |
| 2359 | RVAsPLVHK |
| 2360 | RVAsPLVHY |
| 2361 | RVAsPPPPPK |
| 2362 | RVAsPPPPPY |
| 2363 | RVAsPTSGV |
| 2364 | RVAsPTSGVK |
| 2365 | RVAsPTSGVKK |
| 2366 | RVAsPTSGVKR |
| 2367 | RVAsPTSGVY |
| 2368 | RVDsPSHGL |
| 2369 | RVGsLVLNL |
| 2370 | RVIsGVLQL |
| 2371 | RVKLPsGSKK |
| 2372 | RVKsPGsGHVK |
| 2373 | RVKsPGsGHVY |
| 2374 | RVKsPISLK |
| 2375 | RVKsPSPKSER |
| 2376 | RVKsPSPKSEY |
| 2377 | RVKtPTSQSYK |
| 2378 | RVKtPTSQSYR |
| 2379 | RVKtPTSQSYY |
| 2380 | RVKTtPLRR |
| 2381 | RVKTtPLRY |
| 2382 | RVLDRSPsRSAK |
| 2383 | RVLDRSPsRSAY |
| 2384 | RVLHsPPAV |
| 2385 | RVLsGVVTK |
| 2386 | RVLsPLIIK |
| 2387 | RVPsLLVLL |
| 2388 | RVPsSTLKK |
| 2389 | RVPsSTLKY |
| 2390 | RVRKLPsTTL |
| 2391 | RVRQsPLATK |
| 2392 | RVRQsPLATR |
| 2393 | RVRQsPLATY |
| 2394 | RVRRsSFLNAK |
| 2395 | RVRsLSSLREK |
| 2396 | RVRsLSSLREY |
| 2397 | RVRsPTRSF |
| 2398 | RVRsPTRSL |
| 2399 | RVRsPTRSM |
| 2400 | RVRsPTRSP |
| 2401 | RVRsPTRSV |
| 2402 | RVSsPISKK |
| 2403 | RVSsPISKY |
| 2404 | RVSsRFSSK |
| 2405 | RVSsRFSSR |
| 2406 | RVSsRFSSY |
| 2407 | RVSsVKLISK |
| 2408 | RVSsVKLISY |
| 2409 | RVTsAEIKL |
| 2410 | RWsLSMRK |
| 2411 | RWsLSMRY |
| 2412 | RVWEDRPSsA |
| 2413 | RVWsPPRVHKV |
| 2414 | RVYQyIQSR |
| 2415 | RVYQyIQSRFK |
| 2416 | RVYQyIQSRFY |
| 2417 | RVYQyIQSRK |
| 2418 | RVYQyIQSRY |
| 2419 | RVYsPYNHK |
| 2420 | RVYsPYNHR |
| 2421 | RVYsPYNHY |
| 2422 | RVYSRsFSK |
| 2423 | RVYSRsFSY |
| 2424 | RYPsNLQLF |
| 2425 | RYQtQPVTL |
| 2426 | SAARESHPHGVKRSAsPDDDLG |
| 2427 | SARGsPTRPNPPVR |
| 2428 | SARRtPVSY |
| 2429 | SDDEKMPDLE |
| 2430 | sDFHAERAAREK |
| 2431 | SDmPRAHsF |
| 2432 | SDMPRAHsF |
| 2433 | SEFKAMDsI |
| 2434 | SEGsLHRKF |
| 2435 | SEGsLHRKW |
| 2436 | SEGsLHRKY |
| 2437 | SELsPGRSV |
| 2438 | SFDsGSVRL |
| 2439 | SGGAQsPLRYLHVL |
| 2440 | sGGDDDWTHLSSKEVDPST |
| 2441 | sGGDDDWTHLSSKEVDPSTG |
| 2442 | sGGDDDWTHLSSKEVDPSTGE |
| 2443 | sGGDDDWTHLSSKEVDPSTGEL |
| 2444 | sGGDDDWTHLSSKEVDPSTGELQ |
| 2445 | SGPKPLFRRMsSLVGPTQ |
| 2446 | SIDsPQKL |
| 2447 | SIDsPQKY |
| 2448 | SILsFVSGL |
| 2449 | SIMsFHIDL |
| 2450 | SImsPEIQL |
| 2451 | SIMsPEIQL |
| 2452 | SIPtVSGQI |
| 2453 | SISsMEVNV |
| 2454 | SISStPPAV |
| 2455 | SKEDKNGHDGDTHQEDDGEKsD |
| 2456 | SKRGyIGL |
| 2457 | SKtVATFIL |
| 2458 | SLAsLTEKI |
| 2459 | SLDSEDYsL |
| 2460 | SLCsLGDVFL |
| 2461 | SLCsPSYVLY |
| 2462 | SLEsPSYVLY |
| 2463 | SLFGGsVKL |
| 2464 | SLFKRLYsL |
| 2465 | SLFsGDEENA |
| 2466 | SLFsGSYSSL |
| 2467 | SLFsPQNTL |
| 2468 | SLFsPRRNK |
| 2469 | SLFsPRRNY |
| 2470 | SLFsSEESNL |
| 2471 | SLFsSEESNLGA |
| 2472 | SLHDIQLsL |
| 2473 | SLKsPVTVK |
| 2474 | SLLAsPGHISV |
| 2475 | SLLHTSRsL |
| 2476 | SLLNKSsPVK |
| 2477 | SLLNKSsPVKK |
| 2478 | SLLNKSsPVKY |
| 2479 | SLLsLHVDL |
| 2480 | SLLTsPPKA |
| 2481 | SLLTsPPKV |
| 2482 | SLMsGTLESL |
| 2483 | SLMsPGRKK |
| 2484 | SLMsPGRRY |
| 2485 | SLCPRSHsV |
| 2486 | SLQsLETSV |
| 2487 | SLRRsVLMK |
| 2488 | SLRRsVLMY |
| 2489 | SLSsLLVKL |
| 2490 | SLtRSPPRV |
| 2491 | SLTRsPPRV |
| 2492 | SLVDGyFRL |
| 2493 | SLYDRPAsY |
| 2494 | SLYsPVKKK |
| 2495 | SMFsPRRNK |
| 2496 | SMKsPVTVK |
| 2497 | SMLNKSsPVK |
| 2498 | SMLNKSsPVKK |
| 2499 | SMLsQEIQTL |
| 2500 | SMLTsPPKA |
| 2501 | SMLTsPPKV |
| 2502 | SMMsPGRRK |
| 2503 | SMQPRSHsV |
| 2504 | SMRRsVLMK |
| 2505 | SMSsLSREV |
| 2506 | SMtRSPPRV |
| 2507 | SMTRsPPRV |
| 2508 | SMYsPVKKK |
| 2509 | SNFKsPVKTIR |
| 2510 | SPAASISRLsGEQVDGKG |
| 2511 | SPAsPKISF |
| 2512 | SPAsPKISL |
| 2513 | SPAsPKISM |
| 2514 | SPAsPKISV |
| 2515 | SPDsSQSSL |
| 2516 | sPEDEYELLMPHRISSH |
| 2517 | SPEDEYELLMPHRIsSH |
| 2518 | SPEKAGRRsSF |
| 2519 | SPEKAGRRsSL |
| 2520 | SPEKAGRRsSM |
| 2521 | SPEKAGRRsSV |
| 2522 | sPERPFLAILGGAKVADK |
| 2523 | SPERPFLAILGGAKVADKIQ |
| 2524 | SPFKRQLsF |
| 2525 | SPFKRQLsL |
| 2526 | SPFKRQLsM |
| 2527 | SPFKRQLsV |
| 2528 | SPFLsKRSL |
| 2529 | SPGLARKRsF |
| 2530 | SPGLARKRsL |
| 2531 | SPGLARKRsM |
| 2532 | SPGLARKRsV |
| 2533 | SPGsPRPAF |
| 2534 | SPGsPRPAL |
| 2535 | SPGsPRPAM |
| 2536 | SPGsPRPAV |
| 2537 | SPKsPGLKA |
| 2538 | SPKsPGLKF |
| 2539 | SPKsPGLKL |
| 2540 | SPKsPGLKM |
| 2541 | SPKsPGLKV |
| 2542 | SPKsPTAAF |
| 2543 | SPKsPTAAL |
| 2544 | SPKsPTAAM |
| 2545 | SPKsPTAAV |
| 2546 | SPLTKSIsL |
| 2547 | sPPFPVPVYTRQAPKQVIK |
| 2548 | SPRAPVsPLKF |
| 2549 | SPRERsPAL |
| 2550 | SPRGEAsSL |
| 2551 | SPRGEASsL |
| 2552 | SPRPPNsPSI |
| 2553 | SPRRsLGLAL |
| 2554 | SPRRsRSIsF |
| 2555 | SPRRsRSISF |
| 2556 | SPRRsRSIsL |
| 2557 | SPRRsRSISL |
| 2558 | SPRRsRSIsM |
| 2559 | SPKRsRSISM |
| 2560 | SPRRsRSIsV |
| 2561 | SPRRsRSISV |
| 2562 | SPRsITSTF |
| 2563 | SPRsITSTL |
| 2564 | SPRsTTSTM |
| 2565 | SPRsITSTP |
| 2566 | SPRsITSTV |
| 2567 | SPRsPDRTL |
| 2568 | SPRsPGKPF |
| 2569 | SPRsPGKPL |
| 2570 | SPRsPGKPM |
| 2571 | SPRsPGKPV |
| 2572 | SPRsPGRSF |
| 2573 | SPRsPGRSI |
| 2574 | SPRsPGRSL |
| 2575 | SPRsPGRSM |
| 2576 | SPRsPGRSV |
| 2577 | SPRsPGRSX |
| 2578 | SPRsPSGLR |
| 2579 | SPRsPSTTYF |
| 2580 | SPRsPSTTYL |
| 2581 | SPRSPsTTYL |
| 2582 | SPRsPSTTYM |
| 2583 | SPRsPSTTYV |
| 2584 | SPRssQLV |
| 2585 | SPRtPVsPVKF |
| 2586 | SPRTPVsPVKF |
| 2587 | SPRtPVsPVKL |
| 2588 | SPRTPVsPVKL |
| 2589 | SPRtPVsPVKM |
| 2590 | SPRTPVsPVKM |
| 2591 | SPRtPVsPVKV |
| 2592 | SPRTPVsPVKV |
| 2593 | SPSsPSVRRQF |
| 2594 | SPSsPSVRRQL |
| 2595 | SPSsPSVRRQM |
| 2596 | SPSsPSVRRQV |
| 2597 | SPSTSRSGGsSRF |
| 2598 | SPSTSRSGGsSRL |
| 2599 | SPSTSRSGGsSRM |
| 2600 | SPSTSRSGGsSRV |
| 2601 | sPTRPNPPVRNLH |
| 2602 | SPVsPMKEL |
| 2603 | SPVsTRPLEP |
| 2604 | SPVStRPLEP |
| 2605 | SPWHQsF |
| 2606 | SPWHQsL |
| 2607 | SPVVHQsM |
| 2608 | SPVVHQsV |
| 2609 | SQIsPKSWGV |
| 2610 | SRDKHsEY |
| 2611 | SREKHsEI |
| 2612 | SREKHsEl |
| 2613 | SRFNRRVsV |
| 2614 | SRLTHLsF |
| 2615 | SRLTHLsK |
| 2616 | SRLTHLsL |
| 2617 | SRLTHLsM |
| 2618 | SRLTHLsR |
| 2619 | SRLTHLsY |
| 2620 | SRMsPKAQF |
| 2621 | SRMsPKAQK |
| 2622 | SRMsPKAQL |
| 2623 | SRMsPKAQM |
| 2624 | SRMsPKAQR |
| 2625 | SRMsPKAQY |
| 2626 | SRsSRSPYSR |
| 2627 | SRSsSVLsL |
| 2628 | SRSSsVLSL |
| 2629 | SRSSSVLsL |
| 2630 | SRTsPITRF |
| 2631 | SRTsPITRK |
| 2632 | SRTsPITRL |
| 2633 | SRTsPITRM |
| 2634 | SRTsPITRR |
| 2635 | SRTsPITRY |
| 2636 | SRWsGSHQF |
| 2637 | SRWsGSHQK |
| 2638 | SRWsGSHQR |
| 2639 | SRWsGSHQY |
| 2640 | SRYsRsPYSF |
| 2641 | SRYsRSPYSF |
| 2642 | SRYSRsPYSF |
| 2643 | SRYsRsPYSK |
| 2644 | GRYsRSPYSK |
| 2645 | SRYSRsPYSK |
| 2646 | SRYsRsPYSL |
| 2647 | SRYsRSPYSL |
| 2648 | SRYSRsPYSL |
| 2649 | SRYsRsPYSM |
| 2650 | SRYsRSPYSM |
| 2651 | SRYSRsPYSM |
| 2652 | SRYsRsPYSR |
| 2653 | SRYsRSPYSR |
| 2654 | SRYSRsPYSR |
| 2655 | SRYsRsPYSY |
| 2656 | SRYsRSPYSY |
| 2657 | SRYSRsPYSY |
| 2658 | SRYsRtsPYSR |
| 2659 | SSDIsPTRL |
| 2660 | SSDIsPTRY |
| 2661 | SSDKHsEY |
| 2662 | SSDPASQLsY |
| 2663 | SSDsETLRY |
| 2664 | SSDsPQKL |
| 2665 | SSDsPQKY |
| 2666 | SSDsPSYVLY |
| 2667 | SSDsPTNHFF |
| 2668 | SSEIsPTRY |
| 2669 | SSEKHsEY |
| 2670 | SSEPASQLsY |
| 2671 | SSEsETLRY |
| 2672 | SSEsPQKL |
| 2673 | SSEsPQKY |
| 2674 | SSEsPSYVLY |
| 2675 | SSEsPTNHFY |
| 2676 | SSNGKMASRRsEEKEAG |
| 2677 | SSNGKMASRRsEEKEAGEI |
| 2678 | GSPIMRKKVSL |
| 2679 | sSPPFPVPVYTRQAPKQVIK |
| 2680 | SSsPTHAKSAHV |
| 2681 | SSsWRILGSKQSEHRP |
| 2682 | STDIsPTRL |
| 2683 | STDIsPTRY |
| 2684 | STDKHsEY |
| 2685 | STDPASQLsY |
| 2686 | STDsETLRY |
| 2687 | STDsPQKY |
| 2688 | STDsPSYVLY |
| 2689 | STDsPTNHFY |
| 2690 | STEIsPTRL |
| 2691 | STEIsPTRY |
| 2692 | STEKHsEY |
| 2693 | STEPASQLsY |
| 2694 | STEsETLRY |
| 2695 | STEsPQKY |
| 2696 | STEsPSYVLY |
| 2697 | STEsPTNHFY |
| 2698 | STIQNsPTKK |
| 2699 | sTMSLNIITV |
| 2700 | STMsLNIITV |
| 2701 | SVDIsPIRL |
| 2702 | SVDIsPTRL |
| 2703 | SVDIsPTRY |
| 2704 | SVFsPSFGL |
| 2705 | SVGsDYYIQL |
| 2706 | SVKPRRTsL |
| 2707 | SVKsPVTVK |
| 2708 | SVKsPVTVY |
| 2709 | SVLsPS FQL |
| 2710 | SVMDsPKKL |
| 2711 | SVRRsVLMK |
| 2712 | SVRRsVLMY |
| 2713 | SVRsLSLSL |
| 2714 | SVYSGDFGNLEV |
| 2715 | SVYsPVKKK |
| 2716 | SVYsPVKKY |
| 2717 | sYIEHIFEI |
| 2718 | SYPsPVATSY |
| 2719 | sYQKVIELF |
| 2720 | TDKYsKMM |
| 2721 | TEAsPESML |
| 2722 | THKGEIRGASTPFQFRAssP |
| 2723 | TIGEKKEPsDKSVDS |
| 2724 | TKDKYMASRGQKAKsMEG |
| 2725 | TKsVKALSSLHGDD |
| 2726 | TKsVKALSSLHGDDQ |
| 2727 | TKsVKALSSLHGDDQD |
| 2728 | TLAsPSVFKST |
| 2729 | TLAsPSVFKSV |
| 2730 | TLLAsPMLK |
| 2731 | TLMERTVSL |
| 2732 | TLSsPPPGL |
| 2733 | TMAsPGKDNY |
| 2734 | TMAsPSVFKST |
| 2735 | TMAsPSVFKSV |
| 2736 | TMDsPGKDNY |
| 2737 | TMEsPGKDNY |
| 2738 | TMMsPSQFL |
| 2739 | TPAQPQRRsF |
| 2740 | TPAQPQRRsL |
| 2741 | TPAQPQRRsM |
| 2742 | TPAQPQRRsV |
| 2743 | TPDPSKFFSQLsSEHGGDV |
| 2744 | tPDPSKFFSQLSSEHGGDVQ |
| 2745 | TPIsPGRASGF |
| 2746 | TPIsPGRASGL |
| 2747 | TPIsPGRASGM |
| 2748 | TPISPGRASGV |
| 2749 | TPMKKHLsL |
| 2750 | TPRsPPLGF |
| 2751 | TPRsPPLGL |
| 2752 | TPRsPPLGLF |
| 2753 | TPRsPPLGLI |
| 2754 | TPRsPPLGLL |
| 2755 | TPRsPPLGLM |
| 2756 | TPRsPPLGLV |
| 2757 | TPRsPPLGM |
| 2758 | TPRsPPLGV |
| 2759 | TQSSGKsSV |
| 2760 | TRKtPESFL |
| 2761 | TRLsPAKIVLF |
| 2762 | TRLsPAKIVLK |
| 2763 | TRLsPAKIVLR |
| 2764 | TRLsPAKIVLY |
| 2765 | TSAsPGKDNY |
| 2766 | TSDsPGKDNY |
| 2767 | TSDtPDYLLKY |
| 2768 | TSEsPGKDNY |
| 2769 | TSEtPDYLLKY |
| 2770 | TTAsPGKDNY |
| 2771 | TTDsPGKDNY |
| 2772 | TTDtPDYLLKY |
| 2773 | TTEsPGKDNY |
| 2774 | TTEtPDYLLKY |
| 2775 | TTKsVKALSSLHG |
| 2776 | TTKsVKALSSLHGDD |
| 2777 | TTKsVKALSSLHGDDQ |
| 2778 | TTKsVKALSSLHGDDQD |
| 2779 | TTKsVKALSSLHGDDQDS |
| 2780 | TTKsVKALSSLHGDDQDsED |
| 2781 | TTKSVKALSSLHGDDQDsED |
| 2782 | TTKsVKALSSLHGDDQDsEDE |
| 2783 | TTKSVKALSSLHGDDQDsEDE |
| 2784 | TVFsPTLPAA |
| 2785 | TVMsNSSVIHL |
| 2786 | VAKRLsL |
| 2787 | VAMPVKKSPRRSsSDEQGLSYSSLKNV |
| 2788 | VIDsQELSKV |
| 2789 | VLDsPASKK |
| 2790 | VLFPEsPARA |
| 2791 | VLFRtPLASV |
| 2792 | VLFsSPPQM |
| 2793 | VLFSsPPQM |
| 2794 | VLIENVAsL |
| 2795 | VLIGsPKKV |
| 2796 | VLIGsPKKY |
| 2797 | VLKGsRSSEL |
| 2798 | VLKGsRSSEV |
| 2799 | VLKSRKssVTEE |
| 2800 | VLKVMIGsPK |
| 2801 | VLKVMIGsPKK |
| 2802 | VLKVMIGsPKKK |
| 2803 | VLLsPVPEL |
| 2804 | VLLsPVPEV |
| 2805 | VLMK(sPs)PAL |
| 2806 | VLMK(sPs)PAV |
| 2807 | VLQtPPYVK |
| 2808 | VLQtPPYVKK |
| 2809 | VLQtPPYVKY |
| 2810 | VLSDVIPsI |
| 2811 | VLSSLtPAKV |
| 2812 | VLWDTPsI |
| 2813 | VLYsPQMAL |
| 2814 | VMFRtPLASV |
| 2815 | VMIGsKKV |
| 2816 | VMIGsPKKV |
| 2817 | VMIGsPKKY |
| 2818 | VMKVMIGsPK |
| 2819 | VMKVMIGsPKK |
| 2820 | VMKVMIGsPKKK |
| 2821 | VMKVMIGsPKKY |
| 2822 | VMLsPVPEL |
| 2823 | VMLsPVPEV |
| 2824 | VMQtPPYVK |
| 2825 | VMQtPPYVKK |
| 2826 | VPHHGFEDWsQIR |
| 2827 | VPKSGRSSsL |
| 2828 | VPKsPAFAL |
| 2829 | VPLIRKKsL |
| 2830 | VPNAPPAYEKLsAEQSPPPY |
| 2831 | VPREVLRLsF |
| 2832 | VPREVLRLsL |
| 2833 | VPREVLRLsM |
| 2834 | VPREVLRLsV |
| 2835 | VPRPERRsSL |
| 2836 | VPRsPKHAHSSSF |
| 2837 | VPRsPKHAHSSSL |
| 2838 | VPRsPKHAHSSSM |
| 2839 | VPRsPKHAHSSSV |
| 2840 | VPStPKSSL |
| 2841 | VPTsPKSSL |
| 2842 | VPVsPGQQL |
| 2843 | VRAsKDLAQ |
| 2844 | VRQsVTSFPDADAFHHQ |
| 2845 | VSKVMIGsPKKV |
| 2846 | VSKVMIGsPKKY |
| 2847 | VTQtPPYVKK |
| 2848 | VTQtPPYVKY |
| 2849 | WDsPGQEVL |
| 2850 | VYTyIQSRF |
| 2851 | WTHLsSKEVDPS |
| 2852 | WTHLsSKEVDPSTG |
| 2853 | YARsVHEEF |
| 2854 | YAVPRRGsL |
| 2855 | YAYDGKDyI |
| 2856 | YEGsPIKV |
| 2857 | YEKLsAEQSPPP |
| 2858 | YFsPFRPY |
| 2859 | yIQSRF |
| 2860 | YLAsLEKKL |
| 2861 | YLDsGIHSG |
| 2862 | YLDsGIHsGA |
| 2863 | YLDsGIHSGA |
| 2864 | YLDsGIHsGV |
| 2865 | YLDsGIHSGV |
| 2866 | yLGLDVPV |
| 2867 | YLGsISTLVTL |
| 2868 | YLIHsPMSL |
| 2869 | YLLsPLNTL |
| 2870 | YLLsPTKLPSI |
| 2871 | YLLsPTKLPSV |
| 2872 | yLQSRYYRA |
| 2873 | YLQsRYYRA |
| 2874 | YLSDsDTEAKL |
| 2875 | YMDsGIHsGA |
| 2876 | YMDsGIHSGA |
| 2877 | YMDsGIHsGV |
| 2878 | YMDsGIHSGV |
| 2879 | YPDPHsPFAV |
| 2880 | YPGGRRsSL |
| 2881 | YPLsPAKVNQY |
| 2882 | YPLsPTKISEY |
| 2883 | YPLsPTKISQY |
| 2884 | YPRsEDEVEGVM |
| 2885 | YPRsFDEVEGF |
| 2886 | YPRsFDEVEGL |
| 2887 | YPRsFDEVEGM |
| 2888 | YPRsFDEVEGV |
| 2889 | YPRsFDEVEGVF |
| 2890 | YPRsFDEVEGVL |
| 2891 | YPRsFDEVEGVM |
| 2892 | YPRsFDEVEGVV |
| 2893 | YPSFRRsSL |
| 2894 | YPSsPRKAL |
| 2895 | YPSsPRKF |
| 2896 | YPSsPRKL |
| 2897 | YPSsPRKM |
| 2898 | YPSsPRKV |
| 2899 | YPYEFsPVKM |
| 2900 | YQLsPTKLPSI |
| 2901 | YQLsPTKLPSV |
| 2902 | YQRPFsPSAY |
| 2903 | YQRsFDEVEGF |
| 2904 | YQRsFDEVEGL |
| 2905 | YQRsFDEVEGM |
| 2906 | YQRsFDEVEGV |
| 2907 | YQRsFDEVEGVF |
| 2908 | YQRsFDEVEGVL |
| 2909 | YQRsFDEVEGVM |
| 2910 | YQRsFDEVEGVV |
| 2911 | YRYsPQSFL |
| 2912 | YTAGtPYKV |
| 2913 | YYTAGSSsPTHAKSAHV |
| 8808 | RLLsAAENFL |

Lowercase s, t, and y indicate phosphorylated serine, phosphorylated threonine, and phosphorylated tyrosine, respectively.
Lowercase c indicates that the cysteine is present in a cysteine-cysteine disulfide bond.
Lowercase m indicates oxidized methionine.
(AcS) indicates an N-terminally acetylated serine.
(sLss) indicates that at least one serine residue in the amino acid sequence SLSS is phosphorylated.
(sPs) indicates that at least one serine residue in the amino acid sequence SPS is phosphorylated.

TABLE 3
Amino acid sequences of exemplary
MHC-binding peptides

| SEQ ID NO | Amino Acid Sequence |
|---|---|
| 2914 | ALTtsAHSV |
| 2915 | ALTtSAHSV |
| 2916 | ALTTsAHSV |
| 2917 | APP(sts)AAAL |
| 2918 | APPsTSAAAL |
| 2919 | APPsTsAAAL |
| 2920 | APPStSAAAL |
| 2921 | APPSTsAAAL |
| 2922 | APPstSAAAL |
| 2923 | APPStsAAAL |
| 2924 | APP<s>TSAAAL |
| 2925 | APPS<t>SAAAL |
| 2926 | APPST<s>AAAL |
| 2927 | APPS<t>sAAAL |
| 2928 | APP<s><t>SAAAL |
| 2929 | APP<s>T<s>AAAL |
| 2930 | APPS<t><s>AAAL |
| 2931 | APRG<n>VISL |
| 2932 | APRtNGVAM |
| 2933 | APTsAAAL |
| 2934 | APTsASNVM |
| 2935 | APTSAsNVM |
| 2936 | APVsASASV |
| 2937 | APVsSKSSL |
| 2938 | EP(sst)VVSL |
| 2939 | EPsSTVVSL |
| 2940 | EPSsTVVSL |
| 2941 | EPSStVVSL |
| 2942 | GLSsLAEEAA |
| 2943 | HP(sss)AAVL⁽ⁱ⁾ |
| 2944 | HP(sst)ASTAL |
| 2945 | HPMsTASQV |
| 2946 | HPssTAAVL |
| 2947 | HPsStAAVL |
| 2948 | HPSstAAVL |
| 2949 | HPsSTASTAL |
| 2950 | HPSsTASTAL |
| 2951 | HPSStASTAL |
| 2952 | HPTtVASY |
| 2953 | IPIsLHTSL |
| 2954 | IPTsSVLSL |
| 2955 | IPVsKPLSL |
| 2956 | IPV<s>KPLSL |
| 2957 | IPVsSHNSL |
| 2958 | IPVssHNSL |
| 2959 | IPV<s>SHNSL |
| 2960 | IPV[s]SHNSL |
| 2961 | KPPtSQSSVL |
| 2962 | KPP<t>SQSSVL |
| 2963 | KPPTsQSSVL |
| 2964 | KPPT<s>QSSVL |
| 2965 | KPPV<s>FFSL |
| 2966 | KPTLY<n>VSL |
| 2967 | LPRN(st)MM |
| 2968 | LPRNstMM |
| 2969 | LPTsLPSSL |
| 2970 | MPVRPT<t>NTF |
| 2971 | (diMe)MPVRPT<t>NTF |
| 2972 | MPVtSSSFF |
| 2973 | NPVsLPSL |
| 2974 | PPS<t>SAAAL |
| 2975 | PPST<s>AAAL |
| 2976 | RPP(sss)QQL |
| 2977 | RPPItQSSL |
| 2978 | (Me)RPPItQSSL |
| 2979 | (diME)RPPItQSSL |
| 2980 | (diME)RPPI[t]QSSL |
| 2981 | RPPQ<s>SSVSL |
| 2982 | RPPsSSQQL |
| 2983 | RPPSsSQQL |
| 2984 | RPPSSsQQL |
| 2985 | RPPVtKASSF |
| 2986 | RPVtASITTM |
| 2987 | TPASsRAQTL |
| 2988 | TPAsSSSAL |
| 2989 | TPIsQAQKL |
| 2990 | TPVsSANMM |
| 2991 | VLTsNVQTI |
| 2992 | VPAsSTSTL |
| 2993 | VPAtHGQVTY |
| 2994 | VPtTSSSL |
| 2995 | VPTtSSSL |
| 2996 | VPTTsSSL |
| 2997 | VPVsGTQGL |
| 2998 | VPVsNQSSL |
| 2999 | VPVsSASEL |
| 3000 | VPVsVGPSL |

Lowercase s and t indicate O-GlcNAcylated
serine and O-GlnNAcylated threonine,
respectively.
(sts), (sss), (ts), (sst), and (st)
indicates at least one of the serine or
threonine residues is modifed with O-GlnNAc.
(i) indicates that two GlnNAc moeities were
detected, but could not be assigned to
specific amino acids.
(Me) indicates methylation of the following
arginine.
(diMe) indicates asymmetric di-methylation of the
following arginine.
<n> indicates hexose-GlcNAcylated asparagine.
<s> indicates hexose-GlcNAcylated serine.
<t> indicates hexose-GlcNAcylated threonine.
[s] indicates acetyl-GlcNAcylated serine.
[t] indicates acetyl-GlcNAcylated threonine.

TABLE 4
Amino acid sequences of exemplary
antigenic polypeptides

| SEQ ID NO | Amino Acid Sequence |
|---|---|
| 3001 | (AcS)AARESHPHGVKRSAsPDDDLGFFRKNLLRLTG |
| 3002 | AAEsPSFLFFRKNLLRLTG |
| 3003 | AASNFKsPVKTIRFFRKNLLRLTG |
| 3004 | ADLsPEREVFFRKNLLRLTG |
| 3005 | AEDEIGtPRKFFFRKNLLRLTG |
| 3006 | AEDEIGtPRKYFFRKNLLRLTG |
| 3007 | AEEEIGtPRKFFFRKNLLRLTG |
| 3008 | AEEEIGtPRKWFFRKNLLRLTG |
| 3009 | AEEEIGtPRKYFFRKNLLRLTG |
| 3010 | AENARSAsFFFRKNLLRLTG |
| 3011 | AENsPTRQQFFFRKNLLRLTG |
| 3012 | AENsPTRQQWFFRKNLLRLTG |
| 3013 | AENsPTRQQYFFRKNLLRLTG |
| 3014 | AENsSSRELFFRKNLLRLTG |
| 3015 | AEQGsPRVSYFFRKNLLRLTG |
| 3016 | AESsPTAGKKFFFRKNLLRLTG |
| 3017 | AESsPTAGKKLFFRKNLLRLTG |
| 3018 | AESsPTAGKKWFFRKNLLRLTG |
| 3019 | AESsPTAGKKYFFRKNLLRLTG |
| 3020 | AGDsPGSQFFFRKNLLRLTG |
| 3021 | AILsPAFKVFFRKNLLRLTG |
| 3022 | AIMRsPQMVFFRKNLLRLTG |
| 3023 | AIsDLQQLFFRKNLLRLTG |
| 3024 | AKLsETISFFRKNLLRLTG |
| 3025 | ALAAsPHAVFFRKNLLRLTG |
| 3026 | ALDsGASLLHLFFRKNLLRLTG |
| 3027 | ALDsGASLLHVFFRKNLLRLTG |
| 3028 | ALGNtPPFLFFRKNLLRLTG |
| 3029 | ALGsRESLATIFFRKNLLRLTG |
| 3030 | ALGsRESLATVFFRKNLLRLTG |
| 3031 | ALIHQsLGLFFRKNLLRLTG |
| 3032 | ALIHQsLGVFFRKNLLRLTG |
| 3033 | ALLGSKsPDPYRLFFRKNLLRLTG |
| 3034 | ALLGSKsPDPYRVFFRKNLLRLTG |
| 3035 | ALLsLLKRVFFRKNLLRLTG |
| 3036 | ALMGsPQLVFFRKNLLRLTG |
| 3037 | ALMGsPQLVAAFFRKNLLRLTG |
| 3038 | ALRSsPIMRKFFRKNLLRLTG |
| 3039 | ALRSsPIMRYFFRKNLLRLTG |
| 3040 | ALVsPPALHNAFFRKNLLRLTG |
| 3041 | APRRYsSSMFFRKNLLRLTG |
| 3042 | ALVsPPALHNVFFRKNLLRLTG |
| 3043 | ALYsGVHKKFFRKNLLRLTG |
| 3044 | ALYsGVHKYFFRKNLLRLTG |
| 3045 | ALYsPAQPSLFFRKNLLRLTG |
| 3046 | ALYtPQAPYFFRKNLLRLTG |
| 3047 | ALYtPQAPYFFRKNLLRLTG |
| 3048 | AMAAsPHAVFFRKNLLRLTG |
| 3049 | AMDsGASLLHLFFRKNLLRLIG |
| 3050 | AMDsGASLLHVFFRKNLLRLIG |
| 3051 | AMGsRESLATIFFRKNLLRLTG |
| 3052 | AMGsRESLATVFFRKNLLRLIG |
| 3053 | AMLGSKsPDPYRLFFRKNLLRLIG |
| 3054 | AMLGSKsPDPYRVFFRKNLLRLIG |
| 3055 | AMPGsPVEVFFRKNLLRLIG |
| 3056 | AMRSsPIMRKFFRKNLLRLTG |
| 3057 | AMVsPPALHNAFFRKNLLRLIG |
| 3058 | AMVsPPALHNVFFRKNLLRLIG |
| 3059 | AMYsGVHKKFFRKNLLRLIG |
| 3060 | APDsPRAFLFFRKNLLRLTG |
| 3061 | APLARASsLFFRKNLLRLTG |
| 3062 | APPAYEKLsFFRKNLLRLTG |
| 3063 | APPAYEKLsAEQFFRKNLLRLTG |
| 3064 | APPAYEKLsAEQSPPFFRKNLLRLTG |
| 3065 | APPAYEKLsAEQSPPPFFRKNLLRLTG |
| 3066 | APPAYEKLsAEQSPPPYFFRKNLLRLTG |
| 3067 | APPPLVPAPRPSsPPRGPGPARADRFFRKNLLRLTG |
| 3068 | APRAPsASPLALFFRKNLLRLTG |
| 3069 | APRDRRAVsFFFRKNLLRLTG |
| 3070 | APRKGsFSALFFRKNLLRLTG |
| 3071 | APRKGsFSALFFFRKNLLRLTG |
| 3072 | APRKGsFSALLFFRKNLLRLTG |
| 3073 | APRKGsFSALMFFRKNLLRLTG |
| 3074 | APRKGsFSALVFFRKNLLRLTG |
| 3075 | APRNGsGVALFFRKNLLRLTG |
| 3076 | APRRYsSSFFFRKNLLRLTG |
| 3077 | APRRYsSSLFFRKNLLRLTG |
| 3078 | APRRYsSSMFFRKNLLRLTG |
| 3079 | APRRYsSSVFFRKNLLRLTG |
| 3080 | APRsPPPSRFFFRKNLLRLTG |
| 3081 | APRsPPPSRLFFRKNLLRLTG |
| 3082 | APRsPPPSRMFFRKNLLRLTG |
| 3083 | APRsPPPSRPFFRKNLLRLTG |
| 3084 | APRsPPPSRVFFRKNLLRLTG |
| 3085 | APSLFHLNtLFFRKNLLRLTG |
| 3086 | APSSARAsPLLFFRKNLLRLTG |
| 3087 | APSTYAHLsPAKFFRKNLLRLTG |
| 3088 | APSTYAHLsPAKTPPPPFFRKNLLRLTG |
| 3089 | APSVRsLSLFFRKNLLRLTG |
| 3090 | APSVRSLsLFFRKNLLRLTG |
| 3091 | ARFsPDDKYSFFFRKNLLRLTG |
| 3092 | ARFsPDDKYSKFFRKNLLRLTG |
| 3093 | ARFsPDDKYSLFFRKNLLRLTG |
| 3094 | ARFsPDDKYSMFFRKNLLRLTG |
| 3095 | ARFsPDDKYSRFFRKNLLRLTG |
| 3096 | ARFsPDDKYSYFFRKNLLRLTG |
| 3097 | ASDEIGtPRKFFRKNLLRLTG |
| 3098 | ASDEIGtPRKYFFRKNLLRLTG |
| 3099 | ASEEIGtPRKFFFRKNLLRLTG |
| 3100 | ASEEIGtPRKYFFRKNLLRLTG |
| 3101 | AsISRLsGEQVDGKGFFRKNLLRLTG |
| 3102 | AsISRLSGEQVDGKGFFRKNLLRLTG |
| 3103 | ASISRLsGEQVDGKGFFRKNLLRLTG |
| 3104 | AsIsRLSGEQVDGKGQFFRKNLLRLTG |
| 3105 | AsISRLSGEQVDKGKGFFRKNLLRLTG |
| 3106 | ASKAsPTLDFTERFFRKNLLRLTG |
| 3107 | ASKMTQPQSKSAFPLSRKNGsGsLDGFFRKNLLRLTG |
| 3108 | AsLGFVFFFRKNLLRLTG |
| 3109 | AsPTIEAQGTSPAHDNFFRKNLLRLTG |
| 3110 | AsPTIEAQGTSPAHDNIFFRKNLLRLTG |
| 3111 | AsPTIEAQGTSPAHDNIAFFRKNLLRLTG |
| 3112 | AtAGPRLGFFFRKNLLRLTG |
| 3113 | AtAGPRLGWFFRKNLLRLTG |
| 3114 | AtAGPRLGYFFRKNLLRLTG |
| 3115 | ATDEIGtPRKFFFRKNLLRLTG |
| 3116 | ATDEIGtPRKYFFRKNLLRLTG |
| 3117 | ATEEIGtPRKFFFRKNLLRLTG |
| 3118 | ATEEIGtPRKYFFRKNLLRLTG |
| 3119 | ATWsGSEFEVFFRKNLLRLTG |
| 3120 | ATYtPQAPKFFRKNLLRLTG |
| 3121 | ATYtPQAPKYFFRKNLLRLTG |
| 3122 | AVIHQsLGLFFRKNLLRLTG |
| 3123 | AVIHQsLGVFFRKNLLRLTG |
| 3124 | AVRPTRLsLFFRKNLLRLTG |
| 3125 | AVVsPPALHNAFFRKNLLRLTG |
| 3126 | AVVsPPALHNVFFRKNLLRLTG |
| 3127 | AYEKLsAEQSPPFFRKNLLRLTG |
| 3128 | DAKKsPLALFFRKNLLRLTG |
| 3129 | DDDWTHLsSKEVDPFFRKNLLRLTG |
| 3130 | DDDWTHLsSKEVDPSFFRKNLLRLTG |
| 3131 | DDDWTHLsSKEVDPSTFFRKNLLRLTG |
| 3132 | DDDWTHLsSKEVDPSTGFFRKNLLRLT |
| 3133 | DDWTHLsSKEVDPSFFRKNLLRLTG |
| 3134 | DEFERIKtFFFRKNLLRLTG |
| 3135 | DEFERIKtWFFRKNLLRLTG |
| 3136 | DEFERIKtYFFRKNLLRLTG |
| 3137 | DEISHRAsFFFRKNLLRLTG |
| 3138 | DEISHRAsWFFRKNLLRLTG |
| 3139 | DEISHRAsYFFRKNLLRLTG |
| 3140 | DERLRINsFFFRKNLLRLTG |
| 3141 | DERLRINsLFFRKNLLRLTG |
| 3142 | DERLRINsWFFRKNLLRLTG |
| 3143 | DERLRINsYFFRKNLLRLTG |
| 3144 | DKLsVIAEDSESGKQFFRKNLLRLTG |
| 3145 | DKLsVIAEDSESGKQNFFRKNLLRLTG |
| 3146 | DKLsVIAEDSESGKQNPFFRKNLLRLTG |
| 3147 | DKLsVIAEDSESGKQNPGFFRKNLLRLTG |
| 3148 | DKLsVIAEDSESGKQNPGDSFFRKNLLRLTG |
| 3149 | DLKRRsmSIFFRKNLLRLTG |
| 3150 | DLKRRsMSIFFRKNLLRLTG |
| 3151 | DLKSSKAsLFFRKNLLRLTG |
| 3152 | DLRtVEKELFFRKNLLRLTG |
| 3153 | DLsEEKFLFFRKNLLRLTG |
| 3154 | DLsEEKFVFFRKNLLRLTG |
| 3155 | DLVPLsPLKKFFRKNLLRLTG |
| 3156 | DLWKItKVMDFFRKNLLRLTG |
| 3157 | DMVPLsPLKKFFRKNLLRLTG |
| 3158 | DPTRRFFKVtPPPGSGPQFFRKNLLRLTG |
| 3159 | DQFERIKtLFFRKNLLRLTG |
| 3160 | DQISHRAsLFFRKNLLRLTG |
| 3161 | DSDPLsPLKYFFRKNLLRLTG |
| 3162 | DSEPLsPLKYFFRKNLLRLTG |
| 3163 | DSsEEKFLFFRKNLLRLTG |
| 3164 | DSsEEKFVFFRKNLLRLTG |
| 3165 | DSVPLsPLKYFFRKNLLRLTG |
| 3166 | DTDPLsPLKYFFRKNLLRLTG |
| 3167 | DTEPLsPLKYFFRKNLLRLTG |
| 3168 | DTVPLsPLKYFFRKNLLRLTG |
| 3169 | DWTHLsSKEVDPSFFRKNLLRLTG |
| 3170 | DWTHLsSKEVDPSTGFFRKNLLRLTG |
| 3171 | EEGsPTMVEKGLEPGVFTLFFRKNLLRLTG |
| 3172 | EELsPTAKFFFRKNLLRLTG |
| 3173 | EELsPTAKFFFRKNLLRLTG |
| 3174 | EEMPENALPsDEDDKDPNDPYRALFFRKNLLRLTG |
| 3175 | EERRsPPAPFFRKNLLRLTG |
| 3176 | EEsSDDGKKFFFRKNLLRLTG |
| 3177 | EEsSDDGKKFFFRKNLLRLTG |
| 3178 | EEsSDDGKKWFFRKNLLRLTG |
| 3179 | EESsDDGKKWFFRKNLLRLTG |
| 3180 | EEsSDDGKKYFFRKNLLRLTG |
| 3181 | EESsDDGKKYFFRKNLLRLTG |
| 3182 | EGEEPTVYsDEEEPKDESARKNDFFRK |
| 3183 | EGsPTMVEKGLEPGVFTLFFRKNLLRLTG |
| 3184 | ELFSsPPAVFFRKNLLRLTG |
| 3185 | ELKKsPTSLKFFRKNLLRLTG |
| 3186 | ELKKsPTSLYFFRKNLLRLTG |
| 3187 | ELLMPHRIsSHFFFRKNLLRLTG |
| 3188 | ELLMPHRIsSHFLFFRKNLLRLTG |
| 3189 | ELRISGsVQLFFRKNLLRLTG |
| 3190 | EMKKsPTSLKFFRKNLLRLTG |
| 3191 | EPAsPAAsISRLsGEQVDGKGFFRKNLLRLTG |
| 3192 | EPAsPAAsISRLSGEQVDGKGFFRKNLLRLTG |
| 3193 | EPKRRsARFFFRKNLLRLTG |
| 3194 | EPKRRsARLFFRKNLLRLTG |
| 3195 | EPKRRsARMFFRKNLLRLTG |
| 3196 | EPKRRsARVFFRKNLLRLTG |
| 3197 | EPRsPSHSFFFRKNLLRLTG |
| 3198 | EPRsPSHSLFFRKNLLRLTG |
| 3199 | EPRsPSHSMFFRKNLLRLTG |
| 3200 | EPRsPSHSVFFRKNLLRLTG |
| 3201 | ERsPLLSQETAGQKPFFRKNLLRLTG |
| 3202 | ERsPLLSQETAGQKPLFFRKNLLRLTG |
| 3203 | ESDsLPRYFFRKNLLRLTG |
| 3204 | ESEsLPRYFFRKNLLRLTG |
| 3205 | ESsVRSQEDQLSRFFRKNLLRLTG |
| 3206 | ESsVRSQEDQLSRRFFRKNLLRLTG |
| 3207 | ETDsLPRYFFRKNLLRLTG |
| 3208 | ETEsLPRYFFRKNLLRLTG |
| 3209 | FDKHTLGDsDNESFFRKNLLRLTG |
| 3210 | FEDDDsNEKLFFRKNLLRLTG |
| 3211 | FIEsPSKLFFRKNLLRLTG |
| 3212 | FIEsPSKYFFRKNLLRLTG |
| 3213 | FIGsPTTPAGLFFRKNLLRLTG |
| 3214 | FKMPQEKsPGYSFFRKNLLRLTG |
| 3215 | FKsPVKTIRFFRKNLLRLTG |
| 3216 | FKtQPVTFFFRKNLLRLTG |
| 3217 | FLDNsFEKVFFRKNLLRLTG |
| 3218 | FLDRPPtPLFIFFRKNLLRLTG |
| 3219 | FLDsLRDLIFFRKNLLRLTG |
| 3220 | FLDtPIAKVFFRKNLLRLTG |
| 3221 | FLFDKPVsPLLLFFRKNLLRLTG |
| 3222 | FLGVRPKsAFFRKNLLRLTG |
| 3223 | FLIIRtVLQLFFRKNLLRLTG |
| 3224 | FLITGGGKGsGFSLFFRKNLLRLTG |
| 3225 | FLLsQNFDDEFFRKNLLRLTG |
| 3226 | FLYsGKETYFFRKNLLRLTG |
| 3227 | FPHsLLSVFFFRKNLLRLTG |
| 3228 | FPHsLLSVIFFRKNLLRLTG |
| 3229 | FPHsLLSVIFFRKNLLRLTG |
| 3230 | FPHsLLSVLFFRKNLLRLTG |
| 3231 | FPHsLLSVMFFRKNLLRLTG |
| 3232 | FPHsLLSVVFFRKNLLRLTG |
| 3233 | FPIsPVRFFFRKNLLRLTG |
| 3234 | FPIsPVRLFFRKNLLRLTG |
| 3235 | FPIsPVRMFFRKNLLRLTG |
| 3236 | FPIsPVRVFFRKNLLRLTG |
| 3237 | FPLDsPKTLVLFFRKNLLRLTG |
| 3238 | FPRRHsVTLFFRKNLLRLTG |
| 3239 | FPRsPTKSSFFFRKNLLRLTG |
| 3240 | FPRsPTKSSLFFRKNLLRLTG |
| 3241 | FPRsPTKSSLDFFFRKNLLRLTG |
| 3242 | FPRsPTKSSLDLFFRKNLLRLTG |
| 3243 | FPRsPTKSSLDMFFRKNLLRLTG |
| 3244 | FPRsPTKSSLDVFFRKNLLRLTG |
| 3245 | FPRsPTKSSMFFRKNLLRLTG |
| 3246 | FPRsPTKSSVFFRKNLLRLTG |
| 3247 | FRFsGRTEYFFRKNLLRLTG |
| 3248 | FRGRYRsPYFFRKNLLRLTG |
| 3249 | FRKsMVEHYFFRKNLLRLTG |
| 3250 | FRRsPIKSSLDYFFRKNLLRLTG |
| 3251 | FRRsPTKSSFFFRKNLLRLTG |
| 3252 | FRRsPTKSSLFFRKNLLRLTG |
| 3253 | FRRsPTKSSLDFFRKNLLRLTG |
| 3254 | FRRsPTKSSLDFFFRKNLLRLTG |
| 3255 | FRRsPTKSSLDLFFRKNLLRLTG |
| 3256 | FRRsPTKSSLDMFFRKNLLRLTG |
| 3257 | FRRsPTKSSLDVFFRKNLLRLTG |
| 3258 | FRRsPTKSSLDYFFRKNLLRLTG |
| 3259 | FRRsPTKSSMFFRKNLLRLTG |
| 3260 | FRRsPTKSSVFFRKNLLRLTG |
| 3261 | FRsPTKSSLDFFFRKNLLRLTG |
| 3262 | FRsPTKSSLDLFFRKNLLRLTG |
| 3263 | FRsPTKSSLDMFFRKNLLRLTG |
| 3264 | FRsPTKSSLDVFFRKNLLRLTG |
| 3265 | FRYsGKTEFFFRKNLLRLTG |
| 3266 | FRYsGKTEKFFRKNLLRLTG |
| 3267 | FRYsGKTELFFRKNLLRLTG |
| 3268 | FRYsGKTEMFFRKNLLRLTG |
| 3269 | FRYsGKTERFFRKNLLRLTG |
| 3270 | FRYsGKTEYFFRKNLLRLTG |
| 3271 | FSDsHEGFSYFFRKNLLRLTG |
| 3272 | FSEsHEGFSYFFRKNLLRLTG |
| 3273 | FSEsPSKLFFRKNLLRLTG |
| 3274 | FSEsPSKYFFRKNLLRLTG |
| 3275 | FSIsPVRFFFRKNLLRLTG |
| 3276 | FSIsPVRLFFRKNLLRLTG |
| 3277 | FSIsPVRMFFRKNLLRLTG |
| 3278 | FSIsPVRVFFRKNLLRLTG |
| 3279 | FSsSHEGFSYFFRKNLLRLTG |
| 3280 | FSSsHEGFSYFFRKNLLRLTG |
| 3281 | FTDsHEGFSYFFRKNLLRLTG |
| 3282 | FTEsHEGFSYFFRKNLLRLTG |
| 3283 | FTEsPSKLFFRKNLLRLTG |
| 3284 | FTEsPSKYFFRKNLLRLTG |
| 3285 | FTKsPYQEFFFRKNLLRLTG |
| 3286 | FTsSHEGFSYFFRKNLLRLTG |
| 3287 | FVSKVMIGsPKKVFFRKNLLRLTG |
| 3288 | GALsPSLLHSLFFRKNLLRLTG |
| 3289 | GAQPGRHsFFFRKNLLRLTG |
| 3290 | GAQPGRHsLFFRKNLLRLTG |
| 3291 | GAQPGRHsVFFRKNLLRLTG |
| 3292 | GDDDWTHLsSKEVDFFRKNLLRLTG |
| 3293 | GDDDWTHLsSKEVDPFFRKNLLRLTG |
| 3294 | GDDDWTHLsSKEVDPSFFRKNLLRLTG |
| 3295 | GDDDWTHLsSKEVDPSTFFRKNLLRLTG |
| 3296 | GDDDWTHLsSKEVDPSTGFFRKNLLRLTG |
| 3297 | GEAsPSHIIFFRKNLLRLTG |
| 3298 | GEEsSDDGKKFFFRKNLLRLTG |
| 3299 | GEEsSDDGKKWFFRKNLLRLTG |
| 3300 | GEEsSDDGKMKYFFRKNLLRLTG |
| 3301 | GEEsSDIDGKKFFFRKNLLRLTG |
| 3302 | GEIsPQREVFFRKNLLRLTG |
| 3303 | GERsPLLSQETAGQKPFFRKNLLRLTG |
| 3304 | GERsPLLSQETAGQKPLFFRKNLLRLTG |
| 3305 | GETsPRTKIFFRKNLLRLTG |
| 3306 | GGDDDWTHLsSKEVDPSFFRKNLLRLTG |
| 3307 | GGDDDWTHLsSKEVDPSTGFFRKNLLRLTG |
| 3308 | GGSFGGRSSGsPFFRKNLLRLTG |
| 3309 | GGSFGGRSSGsVFFRKNLLRLTG |
| 3310 | GIDsPSSSVFFRKNLLRLTG |
| 3311 | GIMsPLAKKFFRKNLLRLTG |
| 3312 | GLAPtPPSMFFRKNLLRLTG |
| 3313 | GLDsGFHSVFFRKNLLRLTG |
| 3314 | GLDsLDQVEIFFRKNLLRLTG |
| 3315 | GLGELLRsLFFRKNLLRLTG |
| 3316 | GLIRSRsFIFKFFRKNLLRLTG |
| 3317 | GLIRSRsFIFYFFRKNLLRLTG |
| 3318 | GLIsPELRHLFFRKNLLRLTG |
| 3319 | GLIsPNVQLFFRKNLLRLTG |
| 3320 | GLIsPVWGAFFRKNLLRLTG |
| 3321 | GLItPGGFSSVFFRKNLLRLTG |
| 3322 | GLLDsPTSIFFRKNLLRLTG |
| 3323 | GLLGSpARLFFRKNLLRLTG |
| 3324 | GLLGsPVRAFFRKNLLRLTG |
| 3325 | GLLGsPVRVFFRKNLLRLTG |
| 3326 | GLLsPARLYAIFFRKNLLRLTG |
| 3327 | GLLsPARLYAVFFRKNLLRLTG |
| 3328 | GLLsPRFVDVFFRKNLLRLTG |
| 3329 | GLLsPRHSLFFRKNLLRLTG |
| 3330 | GLSFGGRSSGsPFFRKNLLRLTG |
| 3331 | GLSFGGRSSGsVFFRKNLLRLTG |
| 3332 | GMLGsPVRVFFRKNLLRLTG |
| 3333 | GMLsPARLYAIFFRKNLLRLTG |
| 3334 | GMLsPARLYAVFFRKNLLRLTG |
| 3335 | GMLsPGKSIEVFFRKNLLRLTG |
| 3336 | GPKPLFRRMsSFFRKNLLRLTG |
| 3337 | GPKPLFRRMsSLFFRKNLLRLTG |
| 3338 | GPKPLFRRMsSLVFFRKNLLRLTG |
| 3339 | GPKPLFRRMsSLVGFFRKNLLRLTG |
| 3340 | GPKPLFRRMsSLVGPFFRKNLLRLTG |
| 3341 | GPKPLFRRMsSLVGPTFFRKNLLRLTG |
| 3342 | GPKPLFRRMsSLVGPTQFFRKNLLRLTG |
| 3343 | GPKPLFRRMsSLVGPTQSFFRKNLLRLTG |
| 3344 | GPPYQRRGsLFFRKNLLRLTG |
| 3345 | GPQPGRHsFFFRKNLLRLTG |
| 3346 | GPQPGRHsLFFRKNLLRLTG |
| 3347 | GPQPGRHsVFFRKNLLRLTG |
| 3348 | GPRPGsPSAFFFRKNLLRLTG |
| 3349 | GPRPGsPSALFFRKNLLRLTG |
| 3350 | GPRPGsPSAMFFRKNLLRLTG |
| 3351 | GPRPGsPSAVFFRKNLLRLTG |
| 3352 | GPRSAsLLFFRKNLLRLTG |
| 3353 | GPRsASLLSFFFRKNLLRLTG |
| 3354 | GPRSAsLLsFFFRKNLLRLTG |
| 3355 | GPRSASLLsFFFRKNLLRLTG |
| 3356 | GPRsAsLLSLFFRKNLLRLTG |
| 3357 | GPRsASLLSLFFRKNLLRLTG |
| 3358 | GPRSAsLLsLFFRKNLLRLTG |
| 3359 | GPRSAsLLSLFFRKNLLRLTG |
| 3360 | GPRSASLLsLFFRKNLLRLTG |
| 3361 | GPRsASLLSMFFRKNLLRLTG |
| 3362 | GPRSAsLLsMFFRKNLLRLTG |
| 3363 | GPRSASLLsMFFRKNLLRLTG |
| 3364 | GPRsASLLSVFFRKNLLRLTG |
| 3365 | GPRSAsLLsVFFRKNLLRLTG |
| 3366 | GPRSASLLsVFFRKNLLRLTG |
| 3367 | GPRsPKAPPFFRKNLLRLTG |
| 3368 | GPRsPPVTLFFRKNLLRLTG |
| 3369 | GQLsPGVQFFFRKNLLRLTG |
| 3370 | GRKsPPPSKFFRKNLLRLTG |
| 3371 | GRKsPPPSKFFRKNLLRLTG |
| 3372 | GRKsPPPSLFFRKNLLRLTG |
| 3373 | GRKsPPPSMFFRKNLLRLTG |
| 3374 | GRKsPPPSRFFRKNLLRLTG |
| 3375 | GRKsPPPSYFFRKNLLRLTG |
| 3376 | GRLGsPHRFFFRKNLLRLTG |
| 3377 | GRLGsPHRKFFRKNLLRLTG |
| 3378 | GRLGsPHRLFFRKNLLRLTG |
| 3379 | GRLGsPHRMFFRKNLLRLTG |
| 3380 | GRLGsPHRRFFRKNLLRLTG |
| 3381 | GRLGsPHRYFFRKNLLRLTG |
| 3382 | GRLsPAYSLFFRKNLLRLTG |
| 3383 | GRLsPKASQVFFFRKNLLRLTG |
| 3384 | GRLsPKASQVKFFRKNLLRLTG |
| 3385 | GRLsPKASQVLFFRKNLLRLTG |
| 3386 | GRLsPKASQVMFFRKNLLRLTG |
| 3387 | GRLsPKASQVRFFRKNLLRLTG |
| 3388 | GRLsPKASQVYFFRKNLLRLTG |
| 3389 | GRLsPVPVPFFFRKNLLRLTG |
| 3390 | GRLsPVPVPKFFRKNLLRLTG |
| 3391 | GRLsPVPVPLFFRKNLLRLTG |
| 3392 | GRLsPVPVPMFFRKNLLRLTG |
| 3393 | GRLsPVPVPRFFRKNLLRLTG |
| 3394 | GRLsPVPVPYFFRKNLLRLTG |
| 3395 | GRQsPSFKLFFRKNLLRLTG |
| 3396 | GRsSPPPGYFFRKNLLRLTG |
| 3397 | GRSsTASLVKFFFRKNLLRLTG |
| 3398 | GRSsTASLVKKFFRKNLLRLTG |
| 3399 | GRSsTASLVKKKFFRKNLLRLTG |
| 3400 | GRSsTASLVKLFFRKNLLRLTG |
| 3401 | GRSsTASLVKMFFRKNLLRLTG |
| 3402 | GRSsTASLVKRFFRKNLLRLTG |
| 3403 | GRSsTASLVKYFFRKNLLRLTG |
| 3404 | GRtGLPDLFFRKNLLRLTG |
| 3405 | GSALGGGGAGLSGRASGGAQsPLRYLHVFFRKNLLRLTG |
| 3406 | GSDsSDDGKKYFFRKNLLRLTG |
| 3407 | GSEsSDDGKKYFFRKNLLRLTG |
| 3408 | GsPHYFSPFFFRKNLLRLTG |
| 3409 | GsPHYFSPFRPYFFRKNLLRLTG |
| 3410 | GsPTMVEKGLEPGVFTLFFRKNLLRLTG |
| 3411 | GsQLAVMMYLFFRKNLLRLTG |
| 3412 | GTDsSDDGKKYFFRKNLLRLTG |
| 3413 | GTEsSDDGKKYFFRKNLLRLTG |
| 3414 | GTIRSRsFIFKFFRKNLLRLTG |
| 3415 | GTIRSRsFIFYFFRKNLLRLTG |
| 3416 | GtLPKYFFRKNLLRLTG |
| 3417 | GtLRRSDSQQAVKFFRKNLLRLTG |
| 3418 | GtLRRSDSQQAVKSFFRKNLLRLTG |
| 3419 | GtLRRSDSQQAVKSPPFFRKNLLRLTG |
| 3420 | GVAsPTITVFFRKNLLRLTG |
| 3421 | GVVsPTFELFFRKNLLRLTG |
| 3422 | HEKKAYsFFFRKNLLRLTG |
| 3423 | HKGEIRGASTPFQFRAssPFFRKNLLRLTG |
| 3424 | HLHsPQHKLFFRKNLLRLTG |
| 3425 | HPKRSVsLFFRKNLLRLTG |
| 3426 | HPRsPNVLFFRKNLLRLTG |
| 3427 | HPRsPNVLSFFFRKNLLRLTG |
| 3428 | HPRsPNVLSLFFRKNLLRLTG |
| 3429 | HPRsPNVLSMFFRKNLLRLTG |
| 3430 | HPRsPNVLSVFFRKNLLRLTG |
| 3431 | HPRsPTPTFFFRKNLLRLTG |
| 3432 | HPRSPtPTFFFRKNLLRLTG |
| 3433 | HPRsPTPTLFFRKNLLRLTG |
| 3434 | HPRSPtPTLFFRKNLLRLTG |
| 3435 | HPRsPTPTMFFRKNLLRLTG |
| 3436 | HPRSPtPTMFFRKNLLRLTG |
| 3437 | HPRSPtPTVFFRKNLLRLTG |
| 3438 | HPsSPTPTVFFRKNLLRLTG |
| 3439 | HRLsPVKGEFFFRKNLLRLTG |
| 3440 | HRLsPVKGEKFFRKNLLRLTG |
| 3441 | HRLsPVKGERFFRKNLLRLTG |
| 3442 | HRLsPVKGEYFFRKNLLRLTG |
| 3443 | HRNsMKVFLFFRKNLLRLTG |
| 3444 | HRNsNPVIAEFFFRKNLLRLTG |
| 3445 | HRNsNPVIAEKFFRKNLLRLTG |
| 3446 | HRNsNPVIAELFFRKNLLRLTG |
| 3447 | HRNsNPVIAERFFRKNLLRLTG |
| 3448 | HRNsNPVIAEYFFRKNLLRLTG |
| 3449 | HRYsTPHAFFFRKNLLRLTG |
| 3450 | HTAsPTGMMKFFRKNLLRLTG |
| 3451 | HVYtPSTTKFFRKNLLRLTG |
| 3452 | IEKIyIMKADTVIVGFFRKNLLRLTG |
| 3453 | IIEtPHKEIFFRKNLLRLTG |
| 3454 | IIEtPHKEYFFRKNLLRLTG |
| 3455 | IISsPLKGYFFRKNLLRLTG |
| 3456 | IISsPLTGKFFRKNLLRLTG |
| 3457 | ILDRtPEKLFFRKNLLRLTG |
| 3458 | ILDRtPEKVFFRKNLLRLTG |
| 3459 | ILDsGIYRIFFRKNLLRLTG |
| 3460 | ILDsGIYRVFFRKNLLRLTG |
| 3461 | ILKPRRsLFFRKNLLRLTG |
| 3462 | ILKsPEIQRAFFRKNLLRLTG |
| 3463 | ILKsPEIQRVFFRKNLLRLTG |
| 3464 | ILQtPQFQMFFRKNLLRLTG |
| 3465 | ILQVsIPSLFFRKNLLRLTG |
| 3466 | IMDRtPEKLFFRKNLLRLTG |
| 3467 | IMDRtPEKVFFRKNLLRLTG |
| 3468 | IMDsGIYRIFFRKNLLRLTG |
| 3469 | IMDsGIYRVFFRKNLLRLTG |
| 3470 | IMKsPEIQRAFFRKNLLRLTG |
| 3471 | IMKsPEIQVRFFRKNLLRLTG |
| 3472 | INKERRSsLFFRKNLLRLTG |
| 3473 | IPVgSSHNSLFFRKNLLRLTG |
| 3474 | IQFsPPFPGAFFRKNLLRLTG |
| 3475 | ISDGtLKYFFRKNLLRLTG |
| 3476 | ISDGtPLKYFFRKNLLRLTG |
| 3477 | ISDSAHtDYFFRKNLLRLTG |
| 3478 | ISDsMHSLYFFRKNLLRLTG |
| 3479 | ISDtPHKEIFFRKNLLRLTG |
| 3480 | ISDtPHKEYFFRKNLLRLTG |
| 3481 | ISEGtLKYFFRKNLLRLTG |
| 3482 | ISEGtPLKYFFRKNLLRLTG |
| 3483 | ISESAHtDYFFRKNLLRLTG |
| 3484 | ISEsMHSLYFFRKNLLRLTG |
| 3485 | ISEtPHKEIFFRKNLLRLTG |
| 3486 | ISEtPHKEYFFRKNLLRLTG |
| 3487 | ISFSAHtDYFFRKNLLRLIG |
| 3488 | ISSsMHSLYFFRKNLLRLTG |
| 3489 | IStDRDPLFFRKNLLRLTG |
| 3490 | IStDRDPYFFRKNLLRLIG |
| 3491 | ITDGtLKYFFRKNLLRLTG |
| 3492 | ITDGtPLKYFFRKNLLRLTG |
| 3493 | ITDSAHtDYFFRKNLLRLTG |
| 3494 | ITDsMHSLYFFRKNLLRLTG |
| 3495 | ITDtPHKEIFFRKNLLRLTG |
| 3496 | ITDtPHKEYFFRKNLLRLTG |
| 3497 | ITEGtLKYFFRKNLLRLTG |
| 3498 | ITEGtPLKYFFRKNLLRLTG |
| 3499 | ITESAHtDYFFRKNLLRLTG |
| 3500 | ITEsMHSLYFFRKNLLRLTG |
| 3501 | ITEtPHKEIFFRKNLLRLTG |
| 3502 | ITEtPHKEYFFRKNLLRLTG |
| 3503 | ITQGtLKYFFRKNLLRLTG |
| 3504 | ITQGtPLKKFFRKNLLRLTG |
| 3505 | ITQGtPLKYFFRKNLLRLTG |
| 3506 | ITtDRDPLFFRKNLLRLTG |
| 3507 | ITtDRDPYFFRKNLLRLTG |
| 3508 | IVLsDSEVIQLFFRKNLLRLTG |
| 3509 | IVRyHQLFFRKNLLRLTG |
| 3510 | IVtDRDPLFFRKNLLRLTG |
| 3511 | IVtDRDPYFFRKNLLRLTG |
| 3512 | IYQyIQSRFFFRKNLLRLTG |
| 3513 | KAFsPVRFFRKNLLRLTG |
| 3514 | KAFsPVRSVFFRKNLLRLTG |
| 3515 | KAKsPAPGLFFRKNLLRLTG |
| 3516 | KAKsPAPGVFFRKNLLRLTG |
| 3517 | KARsPGRAFFFRKNLLRLTG |
| 3518 | KARsPGRALFFRKNLLRLTG |
| 3519 | KARsPGRAMFFRKNLLRLTG |
| 3520 | KARsPGRAVFFRKNLLRLTG |
| 3521 | KASPKRLsLFFRKNLLRLTG |
| 3522 | KAVsLFLcYFFRKNLLRLTG |
| 3523 | KAVsLFLCYFFRKNLLRLTG |
| 3524 | KEGEEPTVYsDEEEPKDESARKNDFFRKNLLRLTG |
| 3525 | KEKsPFRETFFRKNLLRLTG |
| 3526 | KELARQIsFFFRKNLLRLTG |
| 3527 | KEMsPTRQFFFRKNLLRLTG |
| 3528 | KEmsPTRQLFFRKNLLRLTG |
| 3529 | KEMsPTRQLFFRKNLLRLTG |
| 3530 | KEMsPTRQWFFRKNLLRLTG |
| 3531 | KEMsPTRQYFFRKNLLRLTG |
| 3532 | KESsPLSSRKIFFRKNLLRLTG |
| 3533 | KFRPPPLsLFFRKNLLRLTG |
| 3534 | KGIsSSSLKEKFFRKNLLRLTG |
| 3535 | KIAsEIAQLFFRKNLLRLTG |
| 3536 | KIDIVsSQKVFFRKNLLRLTG |
| 3537 | KIDsPTKVKKFFRKNLLRLTG |
| 3538 | KIEKIyIMKADTVIVGFFRKNLLRLTG |
| 3539 | KIEsLENLYLFFRKNLLRLTG |
| 3540 | KIFsGVFVKFFRKNLLRLTG |
| 3541 | KIFsGVFVKVFFRKNLLRLTG |
| 3542 | KIFsKQQGKFFRKNLLRLTG |
| 3543 | KIFsKQQGYFFRKNLLRLTG |
| 3544 | KIGsIIFQVFFRKNLLRLTG |
| 3545 | KIKsFEVVFFFRKNLLRLTG |
| 3546 | KIRSsPREAKFFRKNLLRLTG |
| 3547 | KIRSsPREAYFFRKNLLRLTG |
| 3548 | KIRTsPTFRFFRKNLLRLTG |
| 3549 | KIRTsPTFYFFRKNLLRLTG |
| 3550 | KLAsLEREASVFFRKNLLRLTG |
| 3551 | KLAsLLHQVFFRKNLLRLTG |
| 3552 | KLAsPEKLAGLFFRKNLLRLTG |
| 3553 | KLAsPELERLFFRKNLLRLTG |
| 3554 | KLAsPELERVFFRKNLLRLTG |
| 3555 | KLDIVsSQKVFFRKNLLRLTG |
| 3556 | KLDsFLDMQVFFRKNLLRLTG |
| 3557 | KLDsPRVTVFFRKNLLRLTG |
| 3558 | KLDsPTKVKKFFRKNLLRLTG |
| 3559 | KLDsPTKVKYFFRKNLLRLTG |
| 3560 | KLFPDtPLALFFRKNLLRLTG |
| 3561 | KLFPDtPLAVFFRKNLLRLTG |
| 3562 | KLFsGTVRKFFRKNLLRLTG |
| 3563 | KLFsGVFVKVFFRKNLLRLTG |
| 3564 | KLFsKQQGKFFRKNLLRLTG |
| 3565 | KLFsKQQGYFFRKNLLRLTG |
| 3566 | KLFsPAHKKFFRKNLLRLTG |
| 3567 | KLFsPAHKYFFRKNLLRLTG |
| 3568 | KLFsPSKEAELFFRKNLLRLTG |
| 3569 | KLFsPSKEAEVFFRKNLLRLTG |
| 3570 | KLHGsLARAGKFFRKNLLRLTG |
| 3571 | KLHGsLARAGYFFRKNLLRLTG |
| 3572 | KLIDIVsSQKVFFRKNLLRLTG |
| 3573 | KLIDRTEsLFFRKNLLRLTG |
| 3574 | KLIDVsSQKVFFRKNLLRLTG |
| 3575 | KLIsSSSLKEKFFRKNLLRLTG |
| 3576 | KLIsSSSLKEYFFRKNLLRLTG |
| 3577 | KLKDRLPsIFFRKNLLRLTG |
| 3578 | KLKsNPDFLKFFRKNLLRLTG |
| 3579 | KLKsNPDFLKKFFRKNLLRLTG |
| 3580 | KLKsNPDFLKYFFRKNLLRLTG |
| 3581 | KLKsPAPGLFFRKNLLRLTG |
| 3582 | KLKsPAPGVFFRKNLLRLTG |
| 3583 | KLKsQEIFLFFRKNLLRLTG |
| 3584 | KLKSsPLIEKKFFRKNLLRLTG |
| 3585 | KLKSsPLIEKYFFRKNLLRLTG |
| 3586 | KLKtPLVAKFFRKNLLRLTG |
| 3587 | KLKtPLVARFFRKNLLRLTG |
| 3588 | KLLDFGSLsNLQVFFRKNLLRLTG |
| 3589 | KLLQFYPsLFFRKNLLRLTG |
| 3590 | KLLQFYPsVFFRKNLLRLTG |
| 3591 | KLLsPSDEKLFFRKNLLRLTG |
| 3592 | KLLsPSNEKLFFRKNLLRLTG |
| 3593 | KLLsPSNEKVFFRKNLLRLTG |
| 3594 | KLLSSAQRtLFFRKNLLRLTG |
| 3595 | KLLSSAQRtVFFRKNLLRLTG |
| 3596 | KLLsTEEMELFFRKNLLRLTG |
| 3597 | KLLsTEEMEVFFRKNLLRLTG |
| 3598 | KLLsVERIKFFRKNLLRLTG |
| 3599 | KLLtPIKEKFFRKNLLRLTG |
| 3600 | KLLtPIKEYFFRKNLLRLTG |
| 3601 | KLMAPDIsLFFRKNLLRLTG |
| 3602 | KLMAPDIsVFFRKNLLRLTG |
| 3603 | KLMIDRTEsVFFRKNLLRLTG |
| 3604 | KLMsDVEDVFFRKNLLRLTG |
| 3605 | KLMsPKADVFFRKNLLRLTG |
| 3606 | KLMsPKADVKLFFRKNLLRLTG |
| 3607 | KLMsPKADVKVFFRKNLLRLTG |
| 3608 | KLPDsPALAFFRKNLLRLTG |
| 3609 | KLPDsPALAKFFRKNLLRLTG |
| 3610 | KLPDsPALAKKFFRKNLLRLTG |
| 3611 | KLPDsPALAKYFFRKNLLRLTG |
| 3612 | KLPDsPALAYFFRKNLLRLTG |
| 3613 | KLPsPAPARKFFRKNLLRLTG |
| 3614 | KLPTsPLKMKFFRKNLLRLTG |
| 3615 | KLPTsPLKMYFFRKNLLRLTG |
| 3616 | KLPTtPVKAKFFRKNLLRLTG |
| 3617 | KLPTtPVKAYFFRKNLLRLTG |
| 3618 | KLQEFLQtLFFRKNLLRLTG |
| 3619 | KLQVtSLSVFFRKNLLRLTG |
| 3620 | KLRsPFLQKFFRKNLLRLTG |
| 3621 | KLRsPFLQYFFRKNLLRLTG |
| 3622 | KLRSsPREAKFFRKNLLRLTG |
| 3623 | KLRTsPTFKFFRKNLLRLTG |
| 3624 | KLsGDQPAARFFRKNLLRLTG |
| 3625 | KLSGLsFFFRKNLLRLTG |
| 3626 | KLSsLGNLKFFRKNLLRLTG |
| 3627 | KLSsLGNLKKFFRKNLLRLTG |
| 3628 | KLSsLGNLKYFFRKNLLRLTG |
| 3629 | KLSsPRGGMKFFRKNLLRLTG |
| 3630 | KLSsPRGGMKKFFRKNLLRLTG |
| 3631 | KLSsPRGGMKYFFRKNLLRLTG |
| 3632 | KLsVIAEDSESGKQNFFRKNLLRLTG |
| 3633 | KLsVIAEDSESGKQNPFFRKNLLRLTG |
| 3634 | KLsVIAEDSESGKQNPGFFRKNLLRLTG |
| 3635 | KLVSFHDDsDEDLFFRKNLLRLTG |
| 3636 | KLYsEIDIKVFFRKNLLRLTG |
| 3637 | KLYsGNMEKFFRKNLLRLTG |
| 3638 | KMAsLLHQVFFRKNLLRLTG |
| 3639 | KMAsPELERLFFRKNLLRLTG |
| 3640 | KMAsPELERVFFRKNLLRLTG |
| 3641 | KMDIVsSQKVFFRKNLLRLTG |
| 3642 | KMDsFLDMQLFFRKNLLRLTG |
| 3643 | KMDsFLDMQVFFRKNLLRLTG |
| 3644 | KMDsPRVTVFFRKNLLRLTG |
| 3645 | KMDsPTKVKKFFRKNLLRLTG |
| 3646 | KMFPDtPLALFFRKNLLRLTG |
| 3647 | KMFPDtPLAVFFRKNLLRLTG |
| 3648 | KMFsGTVRKFFRKNLLRLTG |
| 3649 | KMFsGVFVKVFFRKNLLRLTG |
| 3650 | KMFsKQQGKFFRKNLLRLTG |
| 3651 | KMFsPAHKKFFRKNLLRLTG |
| 3652 | KMFsPSKEAELFFRKNLLRLTG |
| 3653 | KMFsPSKEAEVFFRKNLLRLTG |
| 3654 | KMHGsLARAGKFFRKNLLRLTG |
| 3655 | KMIDIVsSQKVFFRKNLLRLTG |
| 3656 | KMIDRTEsLFFRKNLLRLTG |
| 3657 | KMIsSSSLKEKFFRKNLLRLTG |
| 3658 | KMKsNPDFLKFFRKNLLRLTG |
| 3659 | KMKsNPDFLKKFFRKNLLRLTG |
| 3660 | KMKsNPDFLKYFFRKNLLRLTG |
| 3661 | KMKSsPLIEKKFFRKNLLRLTG |
| 3662 | KMKtPLVAKFFRKNLLRLTG |
| 3663 | KMKtPLVARFFRKNLLRLTG |
| 3664 | KMLDFGSLsNLOVFFRKNLLRLTG |
| 3665 | KMLDFGSLsNLQVFFRKNLLRLTG |
| 3666 | KMLQFYPsLFFRKNLLRLTG |
| 3667 | KMLsPSNEKLFFRKNLLRLTG |
| 3668 | KMLsPSNEKVFFRKNLLRLTG |
| 3669 | KMLSSAQRtLFFRKNLLRLTG |
| 3670 | KMLSSAQRtVFFRKNLLRLTG |
| 3671 | KMLsVERIKFFRKNLLRLTG |
| 3672 | KMLtPIKEKFFRKNLLRLTG |
| 3673 | KKMAPDIsVFFRKNLLRLIG |
| 3674 | KM:MsPKADVKLFFRKNLLRLTG |
| 3675 | KM:MsPKADVKVFFRKNLLRLTG |
| 3676 | KMPTsPLKMKFFRKNLLRLTG |
| 3677 | KMPTtPVKAKFFRKNLLRLTG |
| 3678 | KMPTtPVKAYFFRKNLLRLTG |
| 3679 | KMRsPFLQKFFRKNLLRLTG |
| 3680 | KMRSsPREAKFFRKNLLRLTG |
| 3681 | KMRTsPTFKFFRKNLLRLTG |
| 3682 | KMSsLGNLKFFRKNLLRLTG |
| 3683 | KMSsLGNLKKFFRKNLLRLTG |
| 3684 | KMSsLGNLKYFFRKNLLRLTG |
| 3685 | KMSsPRGGMKFFRKNLLRLTG |
| 3686 | KMSsPRGGMKKFFRKNLLRLTG |
| 3687 | KMYsEIDIKVFFRKNLLRLTG |
| 3688 | KMYsGNMEKFFRKNLLRLTG |
| 3689 | KNRsWKYNFFRKNLLRLTG |
| 3690 | KNRsWKYNQFFRKNLLRLTG |
| 3691 | KNRsWKYNQSISLRFFRKNLLRLTG |
| 3692 | KNRsWKYNQSISLRRPFFRKNLLRLTG |
| 3693 | KPAsPARRFFFRKNLLRLTG |
| 3694 | KPAsPARRLFFRKNLLRLTG |
| 3695 | KPAsPARRMFFRKNLLRLTG |
| 3696 | KPAsPARRVFFRKNLLRLTG |
| 3697 | KPAsPKFIVTFFFRKNLLRLTG |
| 3698 | KPAsPKFIVTLFFRKNLLRLTG |
| 3699 | KPAsPKFIVTMFFRKNLLRLTG |
| 3700 | KPAsPKFIVTVFFRKNLLRLTG |
| 3701 | KPEsRRSSLFFRKNLLRLTG |
| 3702 | KPEsRRsSLLFFRKNLLRLTG |
| 3703 | KPEsRRSsLLFFRKNLLRLTG |
| 3704 | KPEsRRSSLLFFRKNLLRLTG |
| 3705 | KPLIRsQSLFFRKNLLRLTG |
| 3706 | KPLIRSQsLFFRKNLLRLTG |
| 3707 | KPPHsPLVFFFRKNLLRLTG |
| 3708 | KPPHsPLVLFFRKNLLRLTG |
| 3709 | KPPHsPLVMFFRKNLLRLTG |
| 3710 | KPPHsPLVVFFRKNLLRLTG |
| 3711 | KPPsPEHQSFFFRKNLLRLTG |
| 3712 | KPPsPEHQSLFFRKNLLRLTG |
| 3713 | KPPsPEHQSMFFRKNLLRLTG |
| 3714 | KPPsPEHQSVFFRKNLLRLTG |
| 3715 | KPPsPSPIEFFFRKNLLRLTG |
| 3716 | KPPsPSPIELFFRKNLLRLTG |
| 3717 | KPPsPSPIEMFFRKNLLRLTG |
| 3718 | KPPsPSPIEVFFRKNLLRLTG |
| 3719 | KPPtPGASFFFRKNLLRLTG |
| 3720 | KPPtPGASLFFRKNLLRLTG |
| 3721 | KPPtPGASMFFRKNLLRLTG |
| 3722 | KPPtPGASVFFRKNLLRLTG |
| 3723 | KPPYRSHsFFFRKNLLRLTG |
| 3724 | KPPYRSHsLFFRKNLLRLTG |
| 3725 | KPPYRSHsMFFRKNLLRLTG |
| 3726 | KPPYRSHsVFFRKNLLRLTG |
| 3727 | KPQTRGKtFFFRKNLLRLTG |
| 3728 | KPQTRGKtLFFRKNLLRLTG |
| 3729 | KPQTRGKtMFFRKNLLRLTG |
| 3730 | KPQTRGKtVFFRKNLLRLTG |
| 3731 | KPRPLsMDLFFRKNLLRLTG |
| 3732 | KPRPPPLsFFFRKNLLRLTG |
| 3733 | KPRPPPLsLFFRKNLLRLTG |
| 3734 | KPRPPPLsMFFRKNLLRLTG |
| 3735 | KPRPPPLsPFFRKNLLRLTG |
| 3736 | KPRPPPLsVFFRKNLLRLTG |
| 3737 | KPRRFsRsLFFRKNLLRLTG |
| 3738 | KPRRFsRSLFFRKNLLRLTG |
| 3739 | KPRsPDHVFFFRKNLLRLTG |
| 3740 | KPRsPDHVLFFRKNLLRLTG |
| 3741 | KPRsPDHVMFFRKNLLRLTG |
| 3742 | KPRsPDHVVFFRKNLLRLTG |
| 3743 | KPRsPFSKIFFRKNLLRLTG |
| 3744 | KPRsPPRAFFFRKNLLRLTG |
| 3745 | KPRsPPRALFFRKNLLRLTG |
| 3746 | KPRsPPRALFFFRKNLLRLTG |
| 3747 | KPRsPPRALLFFRKNLLRLTG |
| 3748 | KPRsPPRALMFFRKNLLRLTG |
| 3749 | KPRsPPRALVFFRKNLLRLTG |
| 3750 | KPRsPPRALVFFFRKNLLRLTG |
| 3751 | KPRsPPRALVLFFRKNLLRLTG |
| 3752 | KPRsPPRALVLFFFRKNLLRLTG |
| 3753 | KPRsPPRALVLLFFRKNLLRLTG |
| 3754 | KPRsPPRALVLMFFRKNLLRLTG |
| 3755 | KPRsPPRALVLPFFRKNLLRLTG |
| 3756 | KPRsPPRALVLVFFRKNLLRLTG |
| 3757 | KPRsPPRALVMFFRKNLLRLTG |
| 3758 | KPRsPPRALVVFFRKNLLRLTG |
| 3759 | KPRsPPRAMFFRKNLLRLTG |
| 3760 | KPRsPPRAVFFRKNLLRLTG |
| 3761 | KPRsPVVEFFFRKNLLRLTG |
| 3762 | KPRsPVVELFFRKNLLRLTG |
| 3763 | KPRsPVVEMFFRKNLLRLTG |
| 3764 | KPRsPVVEVFFRKNLLRLTG |
| 3765 | KPSsPRGSLFFRKNLLRLTG |
| 3766 | KPSsPRGSLLFFRKNLLRLTG |
| 3767 | KPVsPKSGTLFFRKNLLRLTG |
| 3768 | KPYsPLASFFFRKNLLRLTG |
| 3769 | KPYsPLASLFFRKNLLRLTG |
| 3770 | KPYsPLASMFFRKNLLRLTG |
| 3771 | KPYsPLASVFFRKNLLRLTG |
| 3772 | KQDsLVINLFFRKNLLRLTG |
| 3773 | KRAsFAKSFFFRKNLLRLTG |
| 3774 | KRAsFAKSKFFRKNLLRLTG |
| 3775 | KRAsFAKSLFFRKNLLRLTG |
| 3776 | KRAsFAKSMFFRKNLLRLTG |
| 3777 | KRAsFAKSRFFRKNLLRLTG |
| 3778 | KRAsFAKSVFFRKNLLRLTG |
| 3779 | KRAsFAKSYFFRKNLLRLTG |
| 3780 | KRAsGQAFEFFFRKNLLRLTG |
| 3781 | KRAsGQAFEKFFRKNLLRLTG |
| 3782 | KRAsGQAFELFFRKNLLRLTG |
| 3783 | KRAsGQAFERFFRKNLLRLTG |
| 3784 | KRAsGQAFEYFFRKNLLRLTG |
| 3785 | KRASsPFRFFFRKNLLRLTG |
| 3786 | KRASsPFRKFFRKNLLRLTG |
| 3787 | KRASsPFRLFFRKNLLRLTG |
| 3788 | KRASsPFRMFFRKNLLRLTG |
| 3789 | KRASsPFRRFFRKNLLRLTG |
| 3790 | KRASsPFRYFFRKNLLRLTG |
| 3791 | KRAsVFVKFFFRKNLLRLTG |
| 3792 | KRAsVFVKKFFRKNLLRLTG |
| 3793 | KRAsVFVKLFFRKNLLRLTG |
| 3794 | KRAsVFVKMFFRKNLLRLTG |
| 3795 | KRAsVFVKRFFRKNLLRLTG |
| 3796 | KRAsVFVKYFFRKNLLRLTG |
| 3797 | KRAsYILRLFFRKNLLRLTG |
| 3798 | KRFsFKFFFRKNLLRLTG |
| 3799 | KRFsFKKFFRKNLLRLTG |
| 3800 | KRFsFKKsFFFRKNLLRLTG |
| 3801 | KRFsFKKSFFFRKNLLRLTG |
| 3802 | KRFsFKKSKFFRKNLLRLTG |
| 3803 | KRFsFKKSLFFRKNLLRLTG |
| 3804 | KRFsFKKSMFFRKNLLRLTG |
| 3805 | KRFsFKKSRFFRKNLLRLTG |
| 3806 | KRFsFKKSYFFRKNLLRLTG |
| 3807 | KRFsFKLFFRKNLLRLTG |
| 3808 | KRFsFKMFFRKNLLRLTG |
| 3809 | KRFsFKRFFRKNLLRLTG |
| 3810 | KRFsFKsSFFFRKNLLRLTG |
| 3811 | KRFsFKYFFRKNLLRLTG |
| 3812 | KRFsGTVRFFFRKNLLRLTG |
| 3813 | KRFsGTVRKFFRKNLLRLTG |
| 3814 | KRFsGTVRLFFRKNLLRLTG |
| 3815 | KRFsGTVRMFFRKNLLRLTG |
| 3816 | KRFsGTVRRFFRKNLLRLTG |
| 3817 | KRFsGTVRYFFRKNLLRLTG |
| 3818 | KRIVIsPKPFFFRKNLLRLTG |
| 3819 | KRKsFTSLYFFRKNLLRLTG |
| 3820 | KRLEKsPSFFFRKNLLRLTG |
| 3821 | KRLEKSPsFFFRKNLLRLTG |
| 3822 | KRLsPAPQFFFRKNLLRLTG |
| 3823 | KRLsPAPQKFFRKNLLRLTG |
| 3824 | KRLsPAPQLFFRKNLLRLTG |
| 3825 | KRLsPAPQMFFRKNLLRLTG |
| 3826 | KRLsPAPQRFFRKNLLRLTG |
| 3827 | KRLsPAPQYFFRKNLLRLTG |
| 3828 | KRLsTSPVRLFFRKNLLRLTG |
| 3829 | KRLsVERIFFFRKNLLRLTG |
| 3830 | KRLsVERIKFFRKNLLRLTG |
| 3831 | KRLsVERILFFRKNLLRLTG |
| 3832 | KRLsVERIMFFRKNLLRLTG |
| 3833 | KRLsVERIRFFRKNLLRLTG |
| 3834 | KRLsVERIYFFRKNLLRLTG |
| 3835 | KRMsPKEFFFRKNLLRLTG |
| 3836 | KRMsPKEKFFRKNLLRLTG |
| 3837 | KRMsPKELFFRKNLLRLTG |
| 3838 | KRMsPKERFFRKNLLRLTG |
| 3839 | KRMsPKEYFFRKNLLRLTG |
| 3840 | KRmsPKPELFFRKNLLRLTG |
| 3841 | KRMsPKPELFFRKNLLRLTG |
| 3842 | KRMsPKPFFFRKNLLRLTG |
| 3843 | KRMsPKPKFFRKNLLRLTG |
| 3844 | KRMsPKPLFFRKNLLRLTG |
| 3845 | KRMsPKPMFFRKNLLRLTG |
| 3846 | KRMsPKPRFFRKNLLRLTG |
| 3847 | KRMsPKPYFFRKNLLRLTG |
| 3848 | KRPEsPPSIFFRKNLLRLTG |
| 3849 | KRWQsPVTKFFRKNLLRLTG |
| 3850 | KRYsEPVSLFFRKNLLRLTG |
| 3851 | KRYsGNMEFFFRKNLLRLTG |
| 3852 | KRYsGNMEKFFRKNLLRLTG |
| 3853 | KRYsGNMELFFRKNLLRLTG |
| 3854 | KRYsGNMEMFFRKNLLRLTG |
| 3855 | KRYsGNMERFFRKNLLRLTG |
| 3856 | KRYsGNmEYFFRKNLLRLTG |
| 3857 | KRYsGNMEYFFRKNLLRLTG |
| 3858 | KRYsRALYLFFRKNLLRLTG |
| 3859 | KSDsRQERYFFRKNLLRLTG |
| 3860 | KSEsRQERYFFRKNLLRLTG |
| 3861 | KSGELLAtWFFRKNLLRLTG |
| 3862 | KSKsNPDFLKKFFRKNLLRLTG |
| 3863 | KSKsNPFLKKFFRKNLLRLTG |
| 3864 | KSKtPLVAKFFRKNLLRLTG |
| 3865 | KSKtPLVARFFRKNLLRLTG |
| 3866 | KSKtPLVAYFFRKNLLRLTG |
| 3867 | KsLVRLLLLFFRKNLLRLTG |
| 3868 | KSSsLGNLKKFFRKNLLRLTG |
| 3869 | KsVKALSSLHGDDQFFRKNLLRLTG |
| 3870 | KsVKALSSLHGDDQDFFRKNLLRLTG |
| 3871 | KsVKALSSLHGDDQDsEDEFFRKNLLRLTG |
| 3872 | KSVKALSSLHGDDQDsEDEFFRKNLLRLTG |
| 3873 | KTDsRQEYRFFRKNLLRLTG |
| 3874 | KTEsRQERYFFRKNLLRLTG |
| 3875 | KtLSPGKNGVVKFFRKNLLRLTG |
| 3876 | KtLSPGKNGVVYFFRKNLLRLTG |
| 3877 | KTMsGTFLLFFRKNLLRLTG |
| 3878 | KTMsPSQMIMFFRKNLLRLTG |
| 3879 | KTPTsPLKMKFFRKNLLRLTG |
| 3880 | KTPTsPLKMYFFRKNLLRLTG |
| 3881 | KTWKGsIGLFFRKNLLRLTG |
| 3882 | KVAsLLHQVFFRKNLLRLTG |
| 3883 | KVDsPVIFFFRKNLLRLTG |
| 3884 | KVHGsLARAGKFFRKNLLRLTG |
| 3885 | KVHGsLARAGYFFRKNLLRLTG |
| 3886 | KVKSsPLIEKKFFRKNLLRLTG |
| 3887 | KVKsSPLIEKLFFRKNLLRLTG |
| 3888 | KVKSsPLIEKLFFRKNLLRLTG |
| 3889 | KVKSsPLIEKYFFRKNLLRLTG |
| 3890 | KVLsKEFHLFFRKNLLRLTG |
| 3891 | KVLSPtAAKFFRKNLLRLTG |
| 3892 | KVLsSLVTLFFRKNLLRLTG |
| 3893 | KVLsTEEMELFFRKNLLRLTG |
| 3894 | KVLStEEMELFFRKNLLRLTG |
| 3895 | KVLtPIKeKFFRKNLLRLTG |
| 3896 | KVLtPIKEKFFRKNLLRLTG |
| 3897 | KVLtPIKEYFFRKNLLRLTG |
| 3898 | KVPDsPALAKFFRKNLLRLTG |
| 3899 | KVPDsPALAKKFFRKNLLRLTG |
| 3900 | KVPDsPALAKYFFRKNLLRLTG |
| 3901 | KVPDsPALAYFFRKNLLRLTG |
| 3902 | KVPTsPLKMYFFRKNLLRLTG |
| 3903 | KVQsLRRALFFRKNLLRLTG |
| 3904 | KVQVtSLSVFFRKNLLRLTG |
| 3905 | KVYsSSEFLFFRKNLLRLTG |
| 3906 | KYIsGPHELFFRKNLLRLTG |
| 3907 | KYsPGKLRGNFFRKNLLRLTG |
| 3908 | LGGGGAGLSGRASGGAQsPLRYLHVFFRKNLLRLTG |
| 3909 | LKLsYLTWVFFRKNLLRLTG |
| 3910 | LLAsPGHISVFFRKNLLRLTG |
| 3911 | LLDPSRSYsYFFRKNLLRLTG |
| 3912 | LLDtPVKTQYFFRKNLLRLTG |
| 3913 | LLFsPVTSLFFRKNLLRLTG |
| 3914 | LLFsPVTSVFFRKNLLRLTG |
| 3915 | LLLsEEVELFFRKNLLRLTG |
| 3916 | LLNKSsPVKFFRKNLLRLTG |
| 3917 | LLNKSsPVKKFFRKNLLRLTG |
| 3918 | LLNKSsPVKYFFRKNLLRLTG |
| 3919 | LMFsPVTSLFFRKNLLRLTG |
| 3920 | LMFsPVTSVFFRKNLLRLTG |
| 3921 | LMFsVTSIFFRKNLLRLTG |
| 3922 | LMFsVTSLFFRKNLLRLTG |
| 3923 | LMNKSsPVKFFRKNLLRLTG |
| 3924 | LMNKSsPVKKFFRKNLLRLTG |
| 3925 | LMNKSsPVKYFFRKNLLRLTG |
| 3926 | LPAsPHQFFFRKNLLRLTG |
| 3927 | LPAsPHQLFFRKNLLRLTG |
| 3928 | LPAsPHQMFFRKNLLRLTG |
| 3929 | LPAsPHQVFFRKNLLRLTG |
| 3930 | LPAsPRARFFFRKNLLRLTG |
| 3931 | LPAsPRARLFFRKNLLRLTG |
| 3932 | LPAsPRARMFFRKNLLRLTG |
| 3933 | LPAsPRARVFFRKNLLRLTG |
| 3934 | LPIFSRLsFFFRKNLLRLTG |
| 3935 | LPIFSRLsIFFRKNLLRLTG |
| 3936 | LPIFSRLsLFFRKNLLRLTG |
| 3937 | LPIFSRLsMFFRKNLLRLTG |
| 3938 | LPIFSRLsVFFRKNLLRLTG |
| 3939 | LPKGLsASLFFRKNLLRLTG |
| 3940 | LPKGLSAsLFFRKNLLRLTG |
| 3941 | LPKsPPYTAFFFRKNLLRLTG |
| 3942 | LPKsPPYTALFFRKNLLRLTG |
| 3943 | LPKsPPYTAMFFRKNLLRLTG |
| 3944 | LPKsPPYTAVFFRKNLLRLTG |
| 3945 | LPRGSsPSVFFFRKNLLRLTG |
| 3946 | LPRGsSPSVLFFRKNLLRLTG |
| 3947 | LPRGSsPSVLFFRKNLLRLTG |
| 3948 | LPRGSsPSVMFFRKNLLRLTG |
| 3949 | LPRGSsPSVVFFRKNLLRLTG |
| 3950 | LPRmIsHSELFFRKNLLRLTG |
| 3951 | LPRMIsHSELFFRKNLLRLTG |
| 3952 | LPRPAsPALFFRKNLLRLTG |
| 3953 | LPRSSsMAAFFRKNLLRLTG |
| 3954 | LPRSSsMAAGLFFRKNLLRLTG |
| 3955 | LPRtPRPELFFRKNLLRLTG |
| 3956 | LPVsPRLQLFFRKNLLRLTG |
| 3957 | LQLsPLKGLSLFFRKNLLRLTG |
| 3958 | LQNItENQLFFRKNLLRLTG |
| 3959 | LSDPSRSYsYFFRKNLLRLTG |
| 3960 | LSDsDTEAKLFFRKNLLRLTG |
| 3961 | LSDsDTEAKYFFRKNLLRLTG |
| 3962 | LSDtPVKTQYFFRKNLLRLTG |
| 3963 | LSEPSRSYsYFFRKNLLRLTG |
| 3964 | LSEsDTEAKLFFRKNLLRLTG |
| 3965 | LSEsDTEAKYFFRKNLLRLTG |
| 3966 | LSEtPVKTQYFFRKNLLRLTG |
| 3967 | LSKFRMPQPSSGREsPRHFFRKNLLRLTG |
| 3968 | LSSsVIRELFFRKNLLRLTG |
| 3969 | LTDPSRSYsYFFRKNLLRLTG |
| 3970 | LTDPSsPTISSYFFRKNLLRLTG |
| 3971 | LTDsDTEAKLFFRKNLLRLTG |
| 3972 | LTDsDTEAKYFFRKNLLRLTG |
| 3973 | LTDtPVKTQYFFRKNLLRLTG |
| 3974 | LTEPSRSYsYFFRKNLLRLTG |
| 3975 | LTEsDTEAKLFFRKNLLRLTG |
| 3976 | LTEsDTEAKYFFRKNLLRLTG |
| 3977 | LTEtPVKTOYFFRKNLLRLTG |
| 3978 | LTEtPVKTQYFFRKNLLRLTG |
| 3979 | MLAEsPSVPRLFFRKNLLRLTG |
| 3980 | MLAEsPSVPRVFFRKNLLRLTG |
| 3981 | MLRsPPRVSKFFRKNLLRLTG |
| 3982 | MMRsPPRVSKFFRKNLLRLTG |
| 3983 | MPRPsIKKAQNSQAARQFFRKNLLRLTG |
| 3984 | MPRQPsAIRMFFRKNLLRLTG |
| 3985 | MPRQPsATRFFFRKNLLRLTG |
| 3986 | MPRQPsATRLFFRKNLLRLTG |
| 3987 | MPRQPsATRMFFRKNLLRLTG |
| 3988 | MPRQPsATRVFFRKNLLRLTG |
| 3989 | MRLsEWLQLFFRKNLLRLTG |
| 3990 | MRLsRELQFFFRKNLLRLTG |
| 3991 | MRLsRELQKFFRKNLLRLTG |
| 3992 | MRLsRELQLFFRKNLLRLTG |
| 3993 | MRLsRELQMFFRKNLLRLTG |
| 3994 | MRLsRELQRFFRKNLLRLTG |
| 3995 | MRLsRELQYFFRKNLLRLTG |
| 3996 | MSDtYRLKYFFRKNLLRLTG |
| 3997 | MSEtYRLKYFFRKNLLRLTG |
| 3998 | MTDtYRLKYFFRKNLLRLTG |
| 3999 | MTEtYRLKYFFRKNLLRLTG |
| 4000 | MTRsPPRVSKFFRKNLLRLTG |
| 4001 | MTRsPPRVSYFFRKNLLRLTG |
| 4002 | NAPPAYEKLsAEFFRKNLLRLTG |
| 4003 | NFKsPVKTIRFFRKNLLRLTG |
| 4004 | NLELSKFRMPQPSSGREsPRHFFRKNLLRLTG |
| 4005 | NLGsRNHVQLFFRKNLLRLTG |
| 4006 | NLLsPDGKMISVFFRKNLLRLTG |
| 4007 | NLVERKNsKFFRKNLLRLTG |
| 4008 | NLVERKNsLFFRKNLLRLTG |
| 4009 | NMDsPGPMLFFRKNLLRLTG |
| 4010 | NMVERKNsKFFRKNLLRLTG |
| 4011 | NMVERKNsLFFRKNLLRLTG |
| 4012 | NRAMRRVsSVPSRFFRKNLLRLTG |
| 4013 | NRAMRRVsSVPSRAQFFRKNLLRLTG |
| 4014 | NRsWKYNQSISLRFFRKNLLRLTG |
| 4015 | NRsWKYNQSISLRRPFFRKNLLRLTG |
| 4016 | NRYtNRVVTFFFRKNLLRLTG |
| 4017 | NRYtNRVVTKFFRKNLLRLTG |
| 4018 | NRYtNRVVTLFFRKNLLRLTG |
| 4019 | NRYtNRVVTMFFRKNLLRLTG |
| 4020 | NRYtNRVVTRFFRKNLLRLTG |
| 4021 | NRYtNRVVTYFFRKNLLRLTG |
| 4022 | NSDsPLRYFFRKNLLRLTG |
| 4023 | NSEsPLRYFFRKNLLRLTG |
| 4024 | NTDsPLRYFFRKNLLRLTG |
| 4025 | NTEsPLRYFFRKNLLRLTG |
| 4026 | NYVERKNsKFFRKNLLRLTG |
| 4027 | NYVERKNsLFFRKNLLRLTG |
| 4028 | NYVERKNsYFFRKNLLRLTG |
| 4029 | PARsPVTEIFFRKNLLRLTG |
| 4030 | PAYEKLsAEFFRKNLLRLTG |
| 4031 | PAYEKLsAEQSPFFRKNLLRLTG |
| 4032 | PmVTLsLNLFFRKNLLRLTG |
| 4033 | PMVTLsLNLFFRKNLLRLTG |
| 4034 | PNAPPAYEKLsAFFRKNLLRLTG |
| 4035 | PPAYEKLsAFFRKNLLRLTG |
| 4036 | PPAYEKLsAEQSFFRKNLLRLTG |
| 4037 | PPLPEDSIKVIRNMRAAsPPAFFRKNLLRLTG |
| 4038 | PYDPALGsPSRFFRKNLLRLTG |
| 4039 | QAASNFKsPVKTIRFFRKNLLRLTG |
| 4040 | QLDsPQRALYFFRKNLLRLTG |
| 4041 | QLEsPQRALYFFRKNLLRLTG |
| 4042 | QLFsPKKGQKFFRKNLLRLTG |
| 4043 | QMFsPKKGQKFFRKNLLRLTG |
| 4044 | QPQRRsLRLFFRKNLLRLTG |
| 4045 | QPRsPGPDYSFFFRKNLLRLTG |
| 4046 | QPRsPGPDYSLFFRKNLLRLTG |
| 4047 | QPRsPGPDYSMFFRKNLLRLTG |
| 4048 | QPRsPGPDYSVFFRKNLLRLTG |
| 4049 | QPRtPsPLVFFFRKNLLRLTG |
| 4050 | QPRtPSPLVFFFRKNLLRLTG |
| 4051 | QPRtPsPLVLFFRKNLLRLTG |
| 4052 | QPRtPSPLVLFFRKNLLRLTG |
| 4053 | QPRtPsPLVMFFRKNLLRLTG |
| 4054 | QPRtPSPLVMFFRKNLLRLTG |
| 4055 | QPRtPsPLVVFFRKNLLRLTG |
| 4056 | QPRtPSPLVVFFRKNLLRLTG |
| 4057 | QPSFPsVLPAFFRKNLLRLTG |
| 4058 | QRLsPLSAAYFFRKNLLRLTG |
| 4059 | QSDsPQRALYFFRKNLLRLTG |
| 4060 | QSEsPQRALYFFRKNLLRLTG |
| 4061 | QTDsPQRALYFFRKNLLRLTG |
| 4062 | QTEsPQRALYFFRKNLLRLTG |
| 4063 | QVAMPVKKSPRRSsSDEQGLSYSSLKNVFFRKNLLRLTG |
| 4064 | QVFsPKKGQKFFRKNLLRLTG |
| 4065 | QVFsPKKGQYFFRKNLLRLTG |
| 4066 | RADsPVHMFFRKNLLRLTG |
| 4067 | RAFsFSKTPKFFRKNLLRLTG |
| 4068 | RAFsFSKTPYFFRKNLLRLTG |
| 4069 | RAFsVKFEVFFRKNLLRLTG |
| 4070 | RAHsEPLALFFRKNLLRLTG |
| 4071 | RAHsSPASLFFRKNLLRLTG |
| 4072 | RAHSsPASLFFRKNLLRLTG |
| 4073 | RAKsPISLKFFRKNLLRLTG |
| 4074 | RAKsPISLYFFRKNLLRLTG |
| 4075 | RAPsPSSRFFFRKNLLRLTG |
| 4076 | RAPsPSSRLFFRKNLLRLTG |
| 4077 | RAPsPSSRMFFRKNLLRLTG |
| 4078 | RAPsPSSRVFFRKNLLRLTG |
| 4079 | RARGIsPIVFFFRKNLLRLTG |
| 4080 | RASsDIVsLFFRKNLLRLTG |
| 4081 | RASsDIVSLFFRKNLLRLTG |
| 4082 | RASsLSITVFFRKNLLRLTG |
| 4083 | REAPsPLmIFFRKNLLRLTG |
| 4084 | REAPsPLMIFFRKNLLRLTG |
| 4085 | REAsPAPLAFFRKNLLRLTG |
| 4086 | REAsPRLRVFFRKNLLRLTG |
| 4087 | REAsPSRLSVFFRKNLLRLTG |
| 4088 | REDsTPGKVFLFFRKNLLRLTG |
| 4089 | REIMGtPEYLFFRKNLLRLTG |
| 4090 | REKsPGRmLFFRKNLLRLTG |
| 4091 | REKsPGRMLFFRKNLLRLTG |
| 4092 | REKsPLFQFFFRKNLLRLTG |
| 4093 | REKsPLFQWFFRKNLLRLTG |
| 4094 | REKsPLFQYFFRKNLLRLTG |
| 4095 | RELARKGsLFFRKNLLRLTG |
| 4096 | RELsPLISLFFRKNLLRLTG |
| 4097 | REPsPLPELFFRKNLLRLTG |
| 4098 | RERsPSPSFFFRKNLLRLTG |
| 4099 | RESsPTRRLFFRKNLLRLTG |
| 4100 | REVsPAPAVFFRKNLLRLTG |
| 4101 | REYGsTSSIFFRKNLLRLTG |
| 4102 | RFKtQPVTFFFRKNLLRLTG |
| 4103 | RGDGYGtFFFRKNLLRLTG |
| 4104 | TGDsPKIDLFFRKNLLRLTG |
| 4105 | RIDsKDSASELFFRKNLLRLTG |
| 4106 | RIGsPLSPKFFRKNLLRLTG |
| 4107 | RISsGVVTKFFRKNLLRLTG |
| 4108 | RILsGVVTYFFRKNLLRLTG |
| 4109 | RILsPSMAKSFFRKNLLRLTG |
| 4110 | RILsPSMASYFFRKNLLRLTG |
| 4111 | RINsFEEHVFFRKNLLRLTG |
| 4112 | RIQsKLYRAFFRKNLLRLTG |
| 4113 | RIQyIQSRFFFRKNLLRLTG |
| 4114 | RIQyIQSRFYFFRKNLLRLTG |
| 4115 | RIsHELDSFFRKNLLRLTG |
| 4116 | RITsLIVHVFFRKNLLRLTG |
| 4117 | RIVQyIQSRFFRKNLLRLTG |
| 4118 | RIYQyIQFFRKNLLRLTG |
| 4119 | RIYQyIQSKFFRKNLLRLTG |
| 4120 | RIYQyIQSRFFRKNLLRLTG |
| 4121 | RIYQyIQSRFFFRKNLLRLTG |
| 4122 | RIYQyIQSRFKFFRKNLLRLTG |
| 4123 | RIYQyIQSRFYFFRKNLLRLTG |
| 4124 | RIYQyIQSRKFFRKNLLRLTG |
| 4125 | RIYQyIQSRYFFRKNLLRLTG |
| 4126 | RIYQyIQSYFFRKNLLRLTG |
| 4127 | RIYQyLQSRFFFRKNLLRLTG |
| 4128 | RIYQyLQSRFYFFRKNLLRLTG |
| 4129 | RKLRsLEQLFFRKNLLRLTG |
| 4130 | RKLsVILIKFFRKNLLRLTG |
| 4131 | RKLsVILILFFRKNLLRLTG |
| 4132 | RKLsVILIYFFRKNLLRLTG |
| 4133 | RKPsIVTKYFFRKNLLRLTG |
| 4134 | RKSsIIIRMFFRKNLLRLTG |
| 4135 | RLAsASRALFFRKNLLRLTG |
| 4136 | RLAsFAVRKFFRKNLLRLTG |
| 4137 | RLAsFAVRYFFRKNLLRLTG |
| 4138 | RLAsIELPSMFFRKNLLRLTG |
| 4139 | RLAsIELPSMAVFFRKNLLRLTG |
| 4140 | RLAsIELPSVFFRKNLLRLTG |
| 4141 | RLAsLNAEALFFRKNLLRLTG |
| 4142 | RLAsLNAEAVFFRKNLLRLTG |
| 4143 | RLAsLQSEVFFRKNLLRLTG |
| 4144 | RLAsLSISVFFRKNLLRLTG |
| 4145 | RLAsPLVHKFFRKNLLRLTG |
| 4146 | RLAsPLVHYFFRKNLLRLTG |
| 4147 | RLAsPPPPPKFFRKNLLRLTG |
| 4148 | RLAsPPPPPYFFRKNLLRLTG |
| 4149 | RLAsPTSGVFFRKNLLRLTG |
| 4150 | RLAsPTSGVKFFRKNLLRLTG |
| 4151 | RLAsPTSGVKKFFRKNLLRLTG |
| 4152 | RLAsPTSGVKRFFRKNLLRLTG |
| 4153 | RLAsPTSGVKYFFRKNLLRLTG |
| 4154 | RLAsRPLLLFFRKNLLRLTG |
| 4155 | RLAsSATQVHKFFRKNLLRLTG |
| 4156 | RLAsYLDKVFFRKNLLRLTG |
| 4157 | RLAsYLDRVFFRKNLLRLTG |
| 4158 | RLDsTPGKVFLFFRKNLLRLTG |
| 4159 | RLDsTPGKVFVFFRKNLLRLTG |
| 4160 | RLDsYLRAPFFRKNLLRLTG |
| 4161 | RLDsYVRFFRKNLLRLTG |
| 4162 | RLDsYVRSFFRKNLLRLTG |
| 4163 | RLDsYVRSLFFRKNLLRLTG |
| 4164 | RLDsYVRSVFFRKNLLRLTG |
| 4165 | RLDtGPQSLFFRKNLLRLTG |
| 4166 | RLEsANRRLFFRKNLLRLTG |
| 4167 | RLFsFSKTPKFFRKNLLRLTG |
| 4168 | RLFsKELFFRKNLLRLTG |
| 4169 | RLFsKELRFFRKNLLRLTG |
| 4170 | RLFsKELRCFFRKNLLRLTG |
| 4171 | RLFsKELRVFFRKNLLRLTG |
| 4172 | RLFSLsNPSLFFRKNLLRLTG |
| 4173 | RLFsPTYGLFFRKNLLRLTG |
| 4174 | RLFsPTYGVFFRKNLLRLTG |
| 4175 | RLFsQGQDVFFRKNLLRLTG |
| 4176 | RLFVGsIPKFFRKNLLRLTG |
| 4177 | RLGsFHELLLFFRKNLLRLTG |
| 4178 | RLIsFKAEVFFRKNLLRLTG |
| 4179 | RLIsPYKKKFFRKNLLRLTG |
| 4180 | RLIsQDVKLFFRKNLLRLTG |
| 4181 | RLIsQDVKVFFRKNLLRLTG |
| 4182 | RLKLPsGSKFFRKNLLRLTG |
| 4183 | RLKLPsGSKKFFRKNLLRLTG |
| 4184 | RLKLPsGSKYFFRKNLLRLTG |
| 4185 | RLKsDERPVHIFFRKNLLRLTG |
| 4186 | RLKsPFRKKFFRKNLLRLTG |
| 4187 | RLKsPGsGHVKFFRKNLLRLTG |
| 4188 | RLKsPISLKFFRKNLLRLTG |
| 4189 | RLKsPISLYFFRKNLLRLTG |
| 4190 | RLKsPSPKSEKFFRKNLLRLTG |
| 4191 | RLKsPSPKSERFFRKNLLRLTG |
| 4192 | RLKtPTSQSYKFFRKNLLRLTG |
| 4193 | RLKtPTSQSYRFFRKNLLRLTG |
| 4194 | RLKTtPLRKFFRKNLLRLTG |
| 4195 | RLKTtPLRRFFRKNLLRLTG |
| 4196 | RLLDPsSPLALFFRKNLLRLTG |
| 4197 | RLLDPSsPLALFFRKNLLRLTG |
| 4198 | RLLDRSPsRSAKFFRKNLLRLTG |
| 4199 | RLLDRSPsRSAYFFRKNLLRLTG |
| 4200 | RLLsDGQQHLFFRKNLLRLTG |
| 4201 | RLLsDLEELFFRKNLLRLTG |
| 4202 | RLLsDQTRLFFRKNLLRLTG |
| 4203 | RLLsFQRYLFFRKNLLRLTG |
| 4204 | RLLsGVVTKFFRKNLLRLTG |
| 4205 | RLLsGVVTYFFRKNLLRLTG |
| 4206 | RLLsHISEAFFRKNLLRLTG |
| 4207 | RLLsHISEVFFRKNLLRLTG |
| 4208 | RLLsPLSSAFFRKNLLRLTG |
| 4209 | RLLsPLSSARLFFRKNLLRLTG |
| 4210 | RLLsPLSSVFFRKNLLRLTG |
| 4211 | RLLsPQQPALFFRKNLLRLTG |
| 4212 | RLLsPRPSLFFRKNLLRLTG |
| 4213 | RLLsPRPSLLFFRKNLLRLTG |
| 4214 | RLLsPSMASKFFRKNLLRLTG |
| 4215 | RLLsSGVSEIFFRKNLLRLTG |
| 4216 | RLLsSGVSEVFFRKNLLRLTG |
| 4217 | RLLsTDAEAVFFRKNLLRLTG |
| 4218 | RLLsVEIVKFFRKNLLRLTG |
| 4219 | RLLsVEIVYFFRKNLLRLTG |
| 4220 | RLLsVHDFDFFFRKNLLRLTG |
| 4221 | RLLsVILIKFFRKNLLRLTG |
| 4222 | RLMsMPVAKFFRKNLLRLTG |
| 4223 | RLMsMPVAYFFRKNLLRLTG |
| 4224 | RLNtSDFQKLFFRKNLLRLTG |
| 4225 | RLPNRIPsLFFRKNLLRLTG |
| 4226 | RLPsFLKKNKFFRKNLLRLTG |
| 4227 | RLPsLVHGYFFRKNLLRLTG |
| 4228 | RLPsSTLKKFFRKNLLRLTG |
| 4229 | RLPsSTLKRFFRKNLLRLTG |
| 4230 | RLPsSTLKYFFRKNLLRLTG |
| 4231 | RLQsLIKNIFFRKNLLRLTG |
| 4232 | RLQsTSERLFFRKNLLRLTG |
| 4233 | RLQsTSERVFFRKNLLRLTG |
| 4234 | RLR(sLss)PTVTLFFRKNLLRLTG |
| 4235 | RLR(sLss)PTVTVFFRKNLLRLTG |
| 4236 | RLRQsPLATKFFRKNLLRLTG |
| 4237 | RLRQsPLATRFFRKNLLRLTG |
| 4238 | RLRQsPLATYFFRKNLLRLTG |
| 4239 | RLRRsPLLKFFRKNLLRLTG |
| 4240 | RLRsAGAAQKFFRKNLLRLTG |
| 4241 | RLRsLSSLREKFFRKNLLRLTG |
| 4242 | RLRsPPPVSKFFRKNLLRLTG |
| 4243 | RLRsYEDMIFFRKNLLRLTG |
| 4244 | RLRTsPITRKFFRKNLLRLTG |
| 4245 | RLRTsPITRRFFRKNLLRLTG |
| 4246 | RLSDtPPLLFFRKNLLRLTG |
| 4247 | RLSsLIRHKFFRKNLLRLTG |
| 4248 | RLSsLRASTSKFFRKNLLRLTG |
| 4249 | RLSsPISKKFFRKNLLRLTG |
| 4250 | RLSsPISKRFFRKNLLRLTG |
| 4251 | RLSsPISKYFFRKNLLRLTG |
| 4252 | RLsSPLHFVFFRKNLLRLTG |
| 4253 | RLSsPLHFVFFRKNLLRLTG |
| 4254 | RLSsPVLHKFFRKNLLRLTG |
| 4255 | RLSsPVLHRFFRKNLLRLTG |
| 4256 | RLSsPVLHYFFRKNLLRLTG |
| 4257 | RLSsRFSSKFFRKNLLRLTG |
| 4258 | RLSsRFSSRFFRKNLLRLTG |
| 4259 | RLSsRFSSYFFRKNLLRLTG |
| 4260 | RLSsRYSQKFFRKNLLRLTG |
| 4261 | RLSsRYSQYFFRKNLLRLTG |
| 4262 | RLSsVKLISKFFRKNLLRLTG |
| 4263 | RLSsVKLISYFFRKNLLRLTG |
| 4264 | RLTFsPTYGVFFRKNLLRLTG |
| 4265 | RLVsLSMRKFFRKNLLRLTG |
| 4266 | RLVsLSMRYFFRKNLLRLTG |
| 4267 | RLYKsPLRHFFRKNLLRLTG |
| 4268 | RLYKsPLRKFFRKNLLRLTG |
| 4269 | RLYQyIQSKFFRKNLLRLTG |
| 4270 | RLYQyIQSRFFRKNLLRLTG |
| 4271 | RLYQyIQSRFKFFRKNLLRLTG |
| 4272 | RLYQyIQSRFYFFRKNLLRLTG |
| 4273 | RLYQyIQSYFFRKNLLRLTG |
| 4274 | RLYQylOSKFFRKNLLRLTG |
| 4275 | RLYQyLQSRFFFRKNLLRLIG |
| 4276 | RLYQyLQSRFKFFRKNLLRLIG |
| 4277 | RLYQyLQSRFYFFRKNLLRLTG |
| 4278 | RLYQyLQSRKFFRKNLLRLIG |
| 4279 | RLYsGPMNKVFFRKNLLRLTG |
| 4280 | RLYsGSRsKFFRKNLLRLTG |
| 4281 | RLYsGSRsRFFRKNLLRLTG |
| 4282 | RLYsGSRsYFFRKNLLRLTG |
| 4283 | RLYsKSRDKFFRKNLLRLTG |
| 4284 | RLYsPDHRQKFFRKNLLRLTG |
| 4285 | RLYsPERSKFFRKNLLRLTG |
| 4286 | RLYsPRNSKFFRKNLLRLTG |
| 4287 | RLYsPYNHKFFRKNLLRLTG |
| 4288 | RLYsPYNHRFFRKNLLRLTG |
| 4289 | RLYsPYNHYFFRKNLLRLTG |
| 4290 | RLYSRsFSKFFRKNLLRLTG |
| 4291 | RLYSRsFSYFFRKNLLRLTG |
| 4292 | RLYsYPRQKFFRKNLLRLTG |
| 4293 | RLYVTTSTRTYsLGFFRKNLLRLTG |
| 4294 | RLYVTTSTRTYsLKFFRKNLLRLTG |
| 4295 | RLYVTTSTRTYsLYFFRKNLLRLTG |
| 4296 | RMAsPPPPPKFFRKNLLRLTG |
| 4297 | RMAsPTSGVFFRKNLLRLTG |
| 4298 | RMAsPTSGVKFFRKNLLRLTG |
| 4299 | RMAsPTSGVKKFFRKNLLRLTG |
| 4300 | RMAsPTSGVKRFFRKNLLRLTG |
| 4301 | RMAsPTSGVKYFFRKNLLRLTG |
| 4302 | RMAsSATQVHKFFRKNLLRLTG |
| 4303 | RMDsTPGKVFLFFRKNLLRLTG |
| 4304 | RMDsTPGKVFVFFRKNLLRLTG |
| 4305 | RMDsYVRSLFFRKNLLRLTG |
| 4306 | RMDsYVRSVFFRKNLLRLTG |
| 4307 | RMFPtPPSLFFRKNLLRLTG |
| 4308 | RMFsFSKTPKFFRKNLLRLTG |
| 4309 | RMFsKELRCFFRKNLLRLTG |
| 4310 | RMFsKELRVFFRKNLLRLTG |
| 4311 | RMFsPMEEKFFRKNLLRLTG |
| 4312 | RMFsPMEEKELLFFRKNLLRLTG |
| 4313 | RMFsPTYGLFFRKNLLRLTG |
| 4314 | RMFsPTYGVFFRKNLLRLTG |
| 4315 | RMIsPYKKKFFRKNLLRLTG |
| 4316 | RMIsQDVKLFFRKNLLRLTG |
| 4317 | RMIsQDVKVFFRKNLLRLTG |
| 4318 | RMIsTGSELFFRKNLLRLTG |
| 4319 | RMKLPsGSKFFRKNLLRLTG |
| 4320 | RMKLPsGSKKFFRKNLLRLTG |
| 4321 | RMKLPsGSKYFFRKNLLRLTG |
| 4322 | RMKsPFRKKFFRKNLLRLTG |
| 4323 | RMKsPGsGHVKFFRKNLLRLTG |
| 4324 | RMKsPSPKSEKFFRKNLLRLTG |
| 4325 | RMKtPTSQSYKFFRKNLLRLTG |
| 4326 | RMKtPTSQSYRFFRKNLLRLTG |
| 4327 | RMKTtPLRKFFRKNLLRLTG |
| 4328 | RMKTtPLRRFFRKNLLRLTG |
| 4329 | RMLDRSPsRSAKFFRKNLLRLTG |
| 4330 | RMLDRSPsRSAYFFRKNLLRLTG |
| 4331 | RMLsHISEAFFRKNLLRLTG |
| 4332 | RMLsHISEVFFRKNLLRLTG |
| 4333 | RMLsLRDQRLFFRKNLLRLTG |
| 4334 | RMLsPLSSAFFRKNLLRLTG |
| 4335 | RMLsPLSSVFFRKNLLRLTG |
| 4336 | RMLsPSMASKFFRKNLLRLTG |
| 4337 | RMLsSGVSEIFFRKNLLRLTG |
| 4338 | RMLsSGVSEVFFRKNLLRLTG |
| 4339 | RMLsVILIKFFRKNLLRLTG |
| 4340 | RMPsFLKKNKFFRKNLLRLTG |
| 4341 | RMPsSTLKKFFRKNLLRLTG |
| 4342 | RMPsSTLKRFFRKNLLRLTG |
| 4343 | RMQsTSERLFFRKNLLRLTG |
| 4344 | RMQsTSERVFFRKNLLRLTG |
| 4345 | RMRQsPLATKFFRKNLLRLTG |
| 4346 | RMRQsPLATRFFRKNLLRLTG |
| 4347 | RMRRsPLLKFFRKNLLRLTG |
| 4348 | RMRsAGAAQKFFRKNLLRLTG |
| 4349 | RMRsLSSLREKFFRKNLLRLTG |
| 4350 | RMRsPPPVSKFFRKNLLRLTG |
| 4351 | RMRTsPITRKFFRKNLLRLTG |
| 4352 | RMRTsPITRRFFRKNLLRLTG |
| 4353 | RMSsLIRHKFFRKNLLRLTG |
| 4354 | RMSsPISKKFFRKNLLRLTG |
| 4355 | RMSsPISKRFFRKNLLRLTG |
| 4356 | RMSsPLHFVFFRKNLLRLTG |
| 4357 | RMSsPVLHKFFRKNLLRLTG |
| 4358 | RMSsRYSQKFFRKNLLRLTG |
| 4359 | RMSsVKLISKFFRKNLLRLTG |
| 4360 | RMSsVKLISYFFRKNLLRLTG |
| 4361 | RMVsLSMRKFFRKNLLRLTG |
| 4362 | RMVsLSMRYFFRKNLLRLTG |
| 4363 | RMYKsPLRHFFRKNLLRLTG |
| 4364 | RMYKsPLRKFFRKNLLRLTG |
| 4365 | RMYQyIQSKFFRKNLLRLTG |
| 4366 | RMYQyIQSRFFRKNLLRLTG |
| 4367 | RMYQyLQSRFFFRKNLLRLIG |
| 4368 | RMYQyLQSRFKFFRKNLLRLIG |
| 4369 | RMYQyLQSRFYFFRKNLLRLIG |
| 4370 | RMYQyLQSRKFFRKNLLRLIG |
| 4371 | RMYsFDDVLFFRKNLLRLTG |
| 4372 | RMYsGSRsKFFRKNLLRLTG |
| 4373 | RMYsGSRsRFFRKNLLRLTG |
| 4374 | RMYsKSRDHFFRKNLLRLTG |
| 4375 | RMYsKSRDKFFRKNLLRLTG |
| 4376 | RMYsKSRDYFFRKNLLRLTG |
| 4377 | RMYsPDHRQKFFRKNLLRLTG |
| 4378 | RMYsPERSKFFRKNLLRLTG |
| 4379 | RMYsPIIYQAFFRKNLLRLTG |
| 4380 | RMYsPIPPSLFFRKNLLRLTG |
| 4381 | RMYsPRNSKFFRKNLLRLTG |
| 4382 | RMYsPYNHKFFRKNLLRLTG |
| 4383 | RMYsPYNHRFFRKNLLRLTG |
| 4384 | RMYsYPRQKFFRKNLLRLTG |
| 4385 | RMYVTTSTRTYsLGFFRKNLLRLTG |
| 4386 | RMYVTTSTRTYsLKFFRKNLLRLTG |
| 4387 | RMYVTTSTRTYsLYFFRKNLLRLTG |
| 4388 | RNLsSPFIFFFRKNLLRLTG |
| 4389 | RPAFFsPSLFFRKNLLRLTG |
| 4390 | RPAKsMDSFFFRKNLLRLTG |
| 4391 | RPAKsMDSLFFRKNLLRLTG |
| 4392 | RPAKsMDSMFFRKNLLRLTG |
| 4393 | RPAKsMDVFFRKNLLRLTG |
| 4394 | RPAsAGAMFFFRKNLLRLTG |
| 4395 | RPAsAGAmLFFRKNLLRLTG |
| 4396 | RPAsAGAMLFFRKNLLRLTG |
| 4397 | RPAsAGAMMFFRKNLLRLTG |
| 4398 | RPAsAGAMVFFRKNLLRLTG |
| 4399 | RPAsARAQPGFFFRKNLLRLTG |
| 4400 | RPAsARAQPGLFFRKNLLRLTG |
| 4401 | RPAsARAQPGMFFRKNLLRLTG |
| 4402 | RPAsARAQPGVFFRKNLLRLTG |
| 4403 | RPAsEARAPGLFFRKNLLRLTG |
| 4404 | RPAsPAAKFFFRKNLLRLTG |
| 4405 | RPAsPAAKLFFRKNLLRLTG |
| 4406 | RPAsPAAKMFFRKNLLRLTG |
| 4407 | RPAsPAAKVFFRKNLLRLTG |
| 4408 | RPAsPEPELFFRKNLLRLTG |
| 4409 | RPAsPGPSLFFRKNLLRLTG |
| 4410 | RPAsPKRAKIFFRKNLLRLTG |
| 4411 | RPAsPKRAKLFFRKNLLRLTG |
| 4412 | RPAsPKRAKXFFRKNLLRLTG |
| 4413 | RPAsPKRAQIFFRKNLLRLTG |
| 4414 | RPAsPKRAQLFFRKNLLRLTG |
| 4415 | RPAsPKRAQXFFRKNLLRLTG |
| 4416 | RPAsPQRAKIFFRKNLLRLTG |
| 4417 | RPAsPQRAKLFFRKNLLRLTG |
| 4418 | RPAsPQRAKXFFRKNLLRLTG |
| 4419 | RPAsPQRAQIFFRKNLLRLTG |
| 4420 | RPAsPQRAQLFFRKNLLRLTG |
| 4421 | RPAsPQRAQXFFRKNLLRLTG |
| 4422 | RPAsPSLQLFFRKNLLRLTG |
| 4423 | RPAsPSLQLLFFRKNLLRLTG |
| 4424 | RPAsPtAIRRIGSVTSRQTFFRKNLLRLTG |
| 4425 | RPAsRFEVLFFRKNLLRLTG |
| 4426 | RPAsYKKKSMLFFRKNLLRLTG |
| 4427 | RPAtGGPGVAFFRKNLLRLTG |
| 4428 | RPAtGGPGVFFFRKNLLRLTG |
| 4429 | RPAtGGPGVLFFRKNLLRLTG |
| 4430 | RPAtGGPGVMFFRKNLLRLTG |
| 4431 | RPAtGGPGVVFFRKNLLRLTG |
| 4432 | RPAtPTSQFFFRKNLLRLTG |
| 4433 | RPAtPTSQLFFRKNLLRLTG |
| 4434 | RPAtPTSQMFFRKNLLRLTG |
| 4435 | RPAtPTSQVFFRKNLLRLTG |
| 4436 | RPDsAHKMLFFRKNLLRLTG |
| 4437 | RPDsPTRPTLFFRKNLLRLTG |
| 4438 | RPDsRLGKTEFFFRKNLLRLTG |
| 4439 | RPDsRLGKTELFFRKNLLRLTG |
| 4440 | RPDsRLGKTEMFFRKNLLRLTG |
| 4441 | RPDsRLGKTEVFFRKNLLRLTG |
| 4442 | RPDVAKRLsLFFRKNLLRLTG |
| 4443 | RPEsDSGLKFFFRKNLLRLTG |
| 4444 | RPEsDSGLKLFFRKNLLRLTG |
| 4445 | RPEsDSGLKMFFRKNLLRLTG |
| 4446 | RPEsDSGLKVFFRKNLLRLTG |
| 4447 | RPEsKDRKFFFRKNLLRLTG |
| 4448 | RPEsKDRKLFFRKNLLRLTG |
| 4449 | RPEsKDRKMFFRKNLLRLTG |
| 4450 | RPEsKDRKVFFRKNLLRLTG |
| 4451 | RPFARsHSFFFRKNLLRLTG |
| 4452 | RPFARSHsFFFRKNLLRLTG |
| 4453 | RPFHGISTVsLFFRKNLLRLTG |
| 4454 | RPFsPREAFFFRKNLLRLTG |
| 4455 | RPFsPREALFFRKNLLRLTG |
| 4456 | RPFsPREAMFFRKNLLRLTG |
| 4457 | RPFsPREAVFFRKNLLRLTG |
| 4458 | RPGsLERKFFFRKNLLRLTG |
| 4459 | RPGsLERKLFFRKNLLRLTG |
| 4460 | RPGsLERKMFFRKNLLRLTG |
| 4461 | RPGsLERKVFFRKNLLRLTG |
| 4462 | RPGsRQAGLFFRKNLLRLTG |
| 4463 | RPGsRqAGLFFRKNLLRLTG |
| 4464 | RPHsPEKAFFFRKNLLRLTG |
| 4465 | RPHsPEKALFFRKNLLRLTG |
| 4466 | RPHsPEKAMFFRKNLLRLTG |
| 4467 | RPHsPEKAVFFRKNLLRLTG |
| 4468 | RPHtPTGIYMFFRKNLLRLTG |
| 4469 | RPHtPTPGIYMFFRKNLLRLTG |
| 4470 | RPIsPGLSFFFRKNLLRLTG |
| 4471 | RPIsPGLSLFFRKNLLRLTG |
| 4472 | RPIsPGLSMFFRKNLLRLTG |
| 4473 | RPIsPGLSVFFRKNLLRLTG |
| 4474 | RPIsPGLSYFFRKNLLRLTG |
| 4475 | RPIsPPHTYFFRKNLLRLTG |
| 4476 | RPIsPRIGALFFRKNLLRLTG |
| 4477 | RPItPPRNSAFFRKNLLRLTG |
| 4478 | RPItPPRNSFFFRKNLLRLTG |
| 4479 | RPItPPRNSLFFRKNLLRLTG |
| 4480 | RPItPPRNSMFFRKNLLRLTG |
| 4481 | RPItPPRNSVFFRKNLLRLTG |
| 4482 | RPKLSsPAFFFRKNLLRLTG |
| 4483 | RPKLSsPALFFRKNLLRLTG |
| 4484 | RPKLSsPAMFFRKNLLRLTG |
| 4485 | RPKLSsPAVFFRKNLLRLTG |
| 4486 | RPKPSSsPFFFRKNLLRLTG |
| 4487 | RPKPSSsPLFFRKNLLRLTG |
| 4488 | RPKPSSsPMFFRKNLLRLTG |
| 4489 | RPKPSSsPVFFRKNLLRLTG |
| 4490 | RPKsNIVLFFFRKNLLRLTG |
| 4491 | RPKsNIVLLFFRKNLLRLTG |
| 4492 | RPKsNIVLMFFRKNLLRLTG |
| 4493 | RPKsNIVLVFFRKNLLRLTG |
| 4494 | RPKsPLSKmFFRKNLLRLTG |
| 4495 | RPKsPLSKMFFRKNLLRLTG |
| 4496 | RPKsQVAEFFFRKNLLRLTG |
| 4497 | RPKsQVAELFFRKNLLRLTG |
| 4498 | RPKsQVAEMFFRKNLLRLTG |
| 4499 | RPKsQVAEVFFRKNLLRLTG |
| 4500 | RPKsVDFDSLFFRKNLLRLTG |
| 4501 | RPKtPPVVIFFRKNLLRLTG |
| 4502 | RPLsLLLALFFRKNLLRLTG |
| 4503 | RPLsPGGAFFFRKNLLRLTG |
| 4504 | RPLsPGGALFFRKNLLRLTG |
| 4505 | RPLsPGGAMFFRKNLLRLTG |
| 4506 | RPLsPGGAVFFRKNLLRLTG |
| 4507 | RPLsPLLFFFRKNLLRLTG |
| 4508 | RPLsPLLLFFRKNLLRLTG |
| 4509 | RPLsPLLMFFRKNLLRLTG |
| 4510 | RPLsPLLVFFRKNLLRLTG |
| 4511 | RPLsVVYVLFFRKNLLRLTG |
| 4512 | RPMsESPHMFFRKNLLRLTG |
| 4513 | RPNsPSPTAFFFRKNLLRLTG |
| 4514 | RPNsPSPTALFFRKNLLRLTG |
| 4515 | RPNsPSPTAMFFRKNLLRLTG |
| 4516 | RPNsPSPTAVFFRKNLLRLTG |
| 4517 | RPPIgTQSSLFFRKNLLRLTG |
| 4518 | RPPPPPDtPFFFRKNLLRLTG |
| 4519 | RPPPPPDtPLFFRKNLLRLTG |
| 4520 | RPPPPPDtPMFFRKNLLRLTG |
| 4521 | RPPPPPDtPPFFRKNLLRLTG |
| 4522 | RPPPPPDtPVFFRKNLLRLTG |
| 4523 | RPPsPGPVFFFRKNLLRLTG |
| 4524 | RPPsPGPVLFFRKNLLRLTG |
| 4525 | RPPsPGPVMFFRKNLLRLTG |
| 4526 | RPPsPGPVVFFRKNLLRLTG |
| 4527 | RPPsPSSRFFFRKNLLRLTG |
| 4528 | RPPsPSSRLFFRKNLLRLTG |
| 4529 | RPPsPSSRMFFRKNLLRLTG |
| 4530 | RPPsPSSRVFFRKNLLRLTG |
| 4531 | RPPsSEFLDFFFRKNLLRLTG |
| 4532 | RPPsSEFLDLFFRKNLLRLTG |
| 4533 | RPPsSEFLDMFFRKNLLRLTG |
| 4534 | RPPsSEFLDVFFRKNLLRLTG |
| 4535 | RPQKTQsIIFFRKNLLRLTG |
| 4536 | RPQRAtSNVFFFRKNLLRLTG |
| 4537 | RPQRATsNVFFFRKNLLRLTG |
| 4538 | RPQRAtSNVLFFRKNLLRLTG |
| 4539 | RPQRATsNVLFFRKNLLRLTG |
| 4540 | RPQRAtSNVMFFRKNLLRLTG |
| 4541 | RPQRATsNVMFFRKNLLRLIG |
| 4542 | RPQRAtSNVVFFRKNLLRLTG |
| 4543 | RPQRATsNVVFFRKNLLRLTG |
| 4544 | RPR(sLss)PTVTLFFRKNLLRLTG |
| 4545 | RPR(sLss)PTVTVFFRKNLLRLTG |
| 4546 | RPRAAtVVFFRKNLLRLTG |
| 4547 | RPRAAtVVAFFRKNLLRLTG |
| 4548 | RPRAAtWFFRKNLLRLTG |
| 4549 | RPRAAtWAFFRKNLLRLTG |
| 4550 | RPRANsGGVDFFFRKNLLRLTG |
| 4551 | RPRANsGGVDLFFRKNLLRLTG |
| 4552 | RPRANsGGVDMFFRKNLLRLTG |
| 4553 | RPRANsGGVDVFFRKNLLRLTG |
| 4554 | RPRARsVDALFFRKNLLRLTG |
| 4555 | RPRDtRRISLFFRKNLLRLTG |
| 4556 | RPRGsESLLFFRKNLLRLTG |
| 4557 | RPRGsQSLFFFRKNLLRLTG |
| 4558 | RPRGsQSLLFFRKNLLRLTG |
| 4559 | RPRGsQSLMFFRKNLLRLTG |
| 4560 | RPRGsQSLVFFRKNLLRLTG |
| 4561 | RPRIPsPIGFFFRKNLLRLTG |
| 4562 | RPRLSsTNSSRFFFRKNLLRLTG |
| 4563 | RPRPAsSPALFFRKNLLRLTG |
| 4564 | RPRPHsAPSFFFRKNLLRLTG |
| 4565 | RPRPHsAPSLFFRKNLLRLTG |
| 4566 | RPRPHsAPSMFFRKNLLRLTG |
| 4567 | RPRPHsAPSVFFRKNLLRLTG |
| 4568 | RPRPSsAHVGLFFRKNLLRLTG |
| 4569 | RPRPsSVLFFRKNLLRLTG |
| 4570 | RPRPsSVLRTLFFRKNLLRLTG |
| 4571 | RPRPVsPSSFFFRKNLLRLTG |
| 4572 | RPRPVsPSSLFFRKNLLRLTG |
| 4573 | RPRPVsPSSLLFFRKNLLRLTG |
| 4574 | RPRPVsPSSMFFRKNLLRLTG |
| 4575 | RPRPVsPSSVFFRKNLLRLTG |
| 4576 | RPRRsSTQFFFRKNLLRLTG |
| 4577 | RPRRsSTQLFFRKNLLRLTG |
| 4578 | RPRRsSTQMFFRKNLLRLTG |
| 4579 | RPRRsSTQVFFRKNLLRLTG |
| 4580 | RPRsAVEQLFFRKNLLRLTG |
| 4581 | RPRsAVLFFFRKNLLRLTG |
| 4582 | RPRsAVLLFFRKNLLRLTG |
| 4583 | RPRsAVLMFFRKNLLRLTG |
| 4584 | RPRsAVLVFFRKNLLRLTG |
| 4585 | RPRSGsTGSSLFFRKNLLRLTG |
| 4586 | RPRsISVEEFFFRKNLLRLTG |
| 4587 | RPRsISVEELFFRKNLLRLTG |
| 4588 | RPRsISVEEMFFRKNLLRLTG |
| 4589 | RPRsISVEEVFFRKNLLRLTG |
| 4590 | RPRsLEVTFFFRKNLLRLTG |
| 4591 | RPRsLEVTIFFRKNLLRLTG |
| 4592 | RPRsLEVTLFFRKNLLRLTG |
| 4593 | RPRsLEVTMFFRKNLLRLTG |
| 4594 | RPRsLEVTVFFRKNLLRLTG |
| 4595 | RPRSLsSPTVFFRKNLLRLTG |
| 4596 | RPRSLsSPTVTFFFRKNLLRLTG |
| 4597 | RPRSLsSPTVTLFFRKNLLRLTG |
| 4598 | RPRSLsSPTVTMFFRKNLLRLTG |
| 4599 | RPRSLsSPTVTVFFRKNLLRLTG |
| 4600 | RPRsMTVSAFFRKNLLRLTG |
| 4601 | RPRsMVRSFFFRKNLLRLTG |
| 4602 | RPRsPAARFFFRKNLLRLTG |
| 4603 | RPRsPAARLFFRKNLLRLTG |
| 4604 | RPRsPAARMFFRKNLLRLTG |
| 4605 | RPRsPAARVFFRKNLLRLTG |
| 4606 | RPRsPGSNSKVFFRKNLLRLTG |
| 4607 | RPRsPNMQDLFFRKNLLRLTG |
| 4608 | RPRsPPGGPFFRKNLLRLTG |
| 4609 | RPRsPPPRAFFFRKNLLRLTG |
| 4610 | RPRsPPPRALFFRKNLLRLTG |
| 4611 | RPRsPPPRAMFFRKNLLRLTG |
| 4612 | RPRsPPPRAPFFRKNLLRLTG |
| 4613 | RPRsPPPRAVFFRKNLLRLTG |
| 4614 | RPRsPPSSPFFRKNLLRLTG |
| 4615 | RPRsPRENSFFFRKNLLRLTG |
| 4616 | RPRsPRENSIFFRKNLLRLTG |
| 4617 | RPRsPRENSLFFRKNLLRLTG |
| 4618 | RPRsPRENSMFFRKNLLRLTG |
| 4619 | RPRsPRENSVFFRKNLLRLTG |
| 4620 | RPRsPRPPPFFRKNLLRLTG |
| 4621 | RPRsPRQNLIFFRKNLLRLTG |
| 4622 | RPRsPRQNSFFFRKNLLRLTG |
| 4623 | RPRsPRQNSIFFRKNLLRLTG |
| 4624 | RPRsPRQNSMFFRKNLLRLTG |
| 4625 | RPRsPRQNSVFFRKNLLRLTG |
| 4626 | RPRsPSPIFFFRKNLLRLTG |
| 4627 | RPRsPSPILFFRKNLLRLTG |
| 4628 | RPRsPSPIMFFRKNLLRLTG |
| 4629 | RPRsPSPISFFRKNLLRLTG |
| 4630 | RPRSPsPISFFRKNLLRLTG |
| 4631 | RPRsPSPIVFFRKNLLRLTG |
| 4632 | RPRsPTGFFFRKNLLRLTG |
| 4633 | RPRsPTGLFFRKNLLRLTG |
| 4634 | RPRsPTGMFFRKNLLRLTG |
| 4635 | RPRsPTGPFFRKNLLRLTG |
| 4636 | RPRsPTGPsNSFFFRKNLLRLTG |
| 4637 | RPRsPTGPSNSFFFRKNLLRLTG |
| 4638 | RPRsPTGPSNSFLFFRKNLLRLTG |
| 4639 | RPRsPTGPsNSLFFRKNLLRLTG |
| 4640 | RPRsPTGPsNSMFFRKNLLRLTG |
| 4641 | RPRsPTGPsNSVFFRKNLLRLTG |
| 4642 | RPRsPTGVFFRKNLLRLTG |
| 4643 | RPRsPTRSFFFRKNLLRLTG |
| 4644 | RPRsPTRSLFFRKNLLRLTG |
| 4645 | RPRsPTRSMFFRKNLLRLTG |
| 4646 | RPRsPTRSVFFRKNLLRLTG |
| 4647 | RPRsPWGKLFFRKNLLRLTG |
| 4648 | RPRsQYNTKLFFRKNLLRLTG |
| 4649 | RPRSTsQSIVSLFFRKNLLRLTG |
| 4650 | RPRtPLRSLFFRKNLLRLTG |
| 4651 | RPSGRREsFFFRKNLLRLTG |
| 4652 | RPSGRREsLFFRKNLLRLTG |
| 4653 | RPSGRREsMFFRKNLLRLTG |
| 4654 | RPSGRREsVFFRKNLLRLTG |
| 4655 | RPsNPQLFFRKNLLRLTG |
| 4656 | RPSRSsPGFFFRKNLLRLTG |
| 4657 | RPSRSsPGLFFRKNLLRLTG |
| 4658 | RPSRSsPGMFFRKNLLRLTG |
| 4659 | RPSRSsPGVFFRKNLLRLTG |
| 4660 | RPSsGFYELFFRKNLLRLTG |
| 4661 | RPSsLDAEIDSFFFRKNLLRLTG |
| 4662 | RPSsLDAEIDSLFFRKNLLRLTG |
| 4663 | RPSsLDAEIDSMFFRKNLLRLTG |
| 4664 | RPSsLDAEIDSVFFRKNLLRLTG |
| 4665 | RPSsLPDFFFRKNLLRLTG |
| 4666 | RPSsLPDLFFRKNLLRLTG |
| 4667 | RPSsLPDMFFRKNLLRLTG |
| 4668 | RPSsLPDVFFRKNLLRLTG |
| 4669 | RPsSPALYFFFRKNLLRLTG |
| 4670 | RPSsPALYFFFRKNLLRLTG |
| 4671 | RPsSPALYLFFRKNLLRLTG |
| 4672 | RPsSPALYMFFRKNLLRLTG |
| 4673 | RPsSPALYVFFRKNLLRLTG |
| 4674 | RPStPKSDSEFFFRKNLLRLTG |
| 4675 | RPStPKSDSELFFRKNLLRLTG |
| 4676 | RPStPKSDSEMFFRKNLLRLTG |
| 4677 | RPStPKSDSEVFFRKNLLRLTG |
| 4678 | RPTKIGRRsLFFRKNLLRLTG |
| 4679 | RPTsFADELFFRKNLLRLTG |
| 4680 | RPTsPIQIMFFRKNLLRLTG |
| 4681 | RPTsRLNRFFFRKNLLRLTG |
| 4682 | RPTsRLNRLFFRKNLLRLTG |
| 4683 | RPTsRLNRMFFRKNLLRLTG |
| 4684 | RPTsRLNRVFFRKNLLRLTG |
| 4685 | RPVsPFQEFFFRKNLLRLTG |
| 4686 | RPVsPFQELFFRKNLLRLTG |
| 4687 | RPVsPFQEMFFRKNLLRLTG |
| 4688 | RPVsPFQEVFFRKNLLRLTG |
| 4689 | RPVsPGKDFFFRKNLLRLTG |
| 4690 | RPVsPGKDIFFRKNLLRLTG |
| 4691 | RPVsPGKDLFFRKNLLRLTG |
| 4692 | RPVsPGKDMFFRKNLLRLTG |
| 4693 | RPVsPGKDVFFRKNLLRLTG |
| 4694 | RPVSPsSLLFFRKNLLRLTG |
| 4695 | RPVsTDFAQYFFRKNLLRLTG |
| 4696 | RPVtPVSDFFFRKNLLRLTG |
| 4697 | RPVtPVSDLFFRKNLLRLTG |
| 4698 | RPVtPVSDMFFRKNLLRLTG |
| 4699 | RPVtPVSDVFFRKNLLRLTG |
| 4700 | RPWsNSRGLFFRKNLLRLTG |
| 4701 | RPWsPAVSAFFRKNLLRLTG |
| 4702 | RPWsPAVSFFFRKNLLRLTG |
| 4703 | RPWsPAVSLFFRKNLLRLTG |
| 4704 | RPWsPAVSMFFRKNLLRLTG |
| 4705 | RPWsPAVSVFFRKNLLRLTG |
| 4706 | RPYsPPFFSFFFRKNLLRLTG |
| 4707 | RPYsPPFFSLFFRKNLLRLTG |
| 4708 | RPYsPPFFSMFFRKNLLRLTG |
| 4709 | RPYsPPFFSVFFRKNLLRLTG |
| 4710 | RPYSPsQALFFRKNLLRLTG |
| 4711 | RPYsPSQYALFFRKNLLRLTG |
| 4712 | RPYSPsQYALFFRKNLLRLTG |
| 4713 | RPYsQVNVLFFRKNLLRLTG |
| 4714 | RQAsIELPSMFFRKNLLRLTG |
| 4715 | RQAsIELPSMAVFFRKNLLRLTG |
| 4716 | RQAsIELPSVFFRKNLLRLTG |
| 4717 | RQAsLSISVFFRKNLLRLTG |
| 4718 | RQAsPLVHKFFRKNLLRLTG |
| 4719 | RQAsPLVHRFFRKNLLRLTG |
| 4720 | RQAsPLVHYFFRKNLLRLTG |
| 4721 | RQDsTPGKVFLFFRKNLLRLTG |
| 4722 | RQDStPGKVFLFFRKNLLRLTG |
| 4723 | RQDsTPGKVFVFFRKNLLRLTG |
| 4724 | RQIsFKAEVFFRKNLLRLTG |
| 4725 | RQIsQDVKLFFRKNLLRLTG |
| 4726 | RQIsQDVKVFFRKNLLRLTG |
| 4727 | RQKsPLFQFFFRKNLLRLTG |
| 4728 | RQLsALHRAFFRKNLLRLTG |
| 4729 | RQLsLEGSGLGVFFRKNLLRLTG |
| 4730 | RQLsSGVSEIFFRKNLLRLTG |
| 4731 | RQLsSGVSEVFFRKNLLRLTG |
| 4732 | RQSsSRFNLFFRKNLLRLTG |
| 4733 | RRAsFAKSFFFRKNLLRLTG |
| 4734 | RRAsFAKSKFFRKNLLRLTG |
| 4735 | RRAsFAKSLFFRKNLLRLTG |
| 4736 | RRAsFAKSMFFRKNLLRLTG |
| 4737 | RRAsFAKSRFFRKNLLRLTG |
| 4738 | RRAsIITKYFFRKNLLRLTG |
| 4739 | RRAsLSEIGFFFRKNLLRLTG |
| 4740 | RRAsLSEIGKFFRKNLLRLTG |
| 4741 | RRAsLSEIGYFFRKNLLRLTG |
| 4742 | RRAsQEANLFFRKNLLRLTG |
| 4743 | RRASsPFRFFFRKNLLRLTG |
| 4744 | RRASsPFRKFFRKNLLRLTG |
| 4745 | RRASsPFRLFFRKNLLRLTG |
| 4746 | RRASsPFRMFFRKNLLRLTG |
| 4747 | RRASsPFRRFFRKNLLRLTG |
| 4748 | RRAsVFVKFFFRKNLLRLTG |
| 4749 | RRAsVFVKKFFRKNLLRLTG |
| 4750 | RRAsVFVKLFFRKNLLRLTG |
| 4751 | RRAsVFVKMFFRKNLLRLTG |
| 4752 | RRAsVFVKRFFRKNLLRLTG |
| 4753 | RRDsIVAEFFFRKNLLRLTG |
| 4754 | RRDsIVAEKFFRKNLLRLTG |
| 4755 | RRDsIVAELFFRKNLLRLTG |
| 4756 | RRDsIVAERFFRKNLLRLTG |
| 4757 | RRDsIVAEYFFRKNLLRLTG |
| 4758 | RRDsLQKPGLFFRKNLLRLTG |
| 4759 | RRFsFEVTLFFRKNLLRLTG |
| 4760 | RRFsFKFFFRKNLLRLTG |
| 4761 | RRFsFKKFFRKNLLRLTG |
| 4762 | RRFsFKKSFFFRKNLLRLTG |
| 4763 | RRFsFKKSKFFRKNLLRLTG |
| 4764 | RRFsFKKSLFFRKNLLRLTG |
| 4765 | RRFsFKKSMFFRKNLLRLTG |
| 4766 | RRFsFKKSRFFRKNLLRLTG |
| 4767 | RRFsFKLFFRKNLLRLTG |
| 4768 | RRFsFKMFFRKNLLRLTG |
| 4769 | RRFsFKRFFRKNLLRLTG |
| 4770 | RRFsGTAVYFFRKNLLRLTG |
| 4771 | RRFsGTVRFFFRKNLLRLTG |
| 4772 | RRFsGTVRKFFRKNLLRLTG |
| 4773 | RRFsGTVRLFFRKNLLRLTG |
| 4774 | RRFsGTVRMFFRKNLLRLTG |
| 4775 | RRFsGTVRRFFRKNLLRLTG |
| 4776 | RRFsIATLRFFRKNLLRLTG |
| 4777 | RRFsLTTLRFFRKNLLRLTG |
| 4778 | RRFsPDDKYSFFFRKNLLRLTG |
| 4779 | RRFsPDDKYSKFFRKNLLRLTG |
| 4780 | RRFsPDDKYSLFFRKNLLRLTG |
| 4781 | RRFsPDDKYSMFFRKNLLRLTG |
| 4782 | RRFsPPRRFFFRKNLLRLTG |
| 4783 | RRFsPPRRKFFRKNLLRLTG |
| 4784 | RRFsPPRRLFFRKNLLRLTG |
| 4785 | RRFsPPRRmFFRKNLLRLTG |
| 4786 | RRFsPPRRMFFRKNLLRLTG |
| 4787 | RRFsPPRRRFFRKNLLRLTG |
| 4788 | RRFsPPRRYFFRKNLLRLTG |
| 4789 | RRFsRLENRYFFRKNLLRLTG |
| 4790 | RRFsRSDELFFRKNLLRLTG |
| 4791 | RRFsRsPIFFFRKNLLRLTG |
| 4792 | RRFsRSPIFFFRKNLLRLTG |
| 4793 | RRFsRsPIKFFRKNLLRLTG |
| 4794 | RRFsRSPIKFFRKNLLRLTG |
| 4795 | RRFsRsPILFFRKNLLRLTG |
| 4796 | RRFsRSPILFFRKNLLRLTG |
| 4797 | RRFsRSPIMFFRKNLLRLTG |
| 4798 | RRFsRsPIRFFRKNLLRLTG |
| 4799 | RRFsRSPIRFFRKNLLRLTG |
| 4800 | RRFSRsPIRFFRKNLLRLTG |
| 4801 | RRFsRsPIRFFFRKNLLRLTG |
| 4802 | RRFsRSPIRFFFRKNLLRLTG |
| 4803 | RRFsRsPIRKFFRKNLLRLTG |
| 4804 | RRFsRSPIRKFFRKNLLRLTG |
| 4805 | RRFsRsPIRLFFRKNLLRLTG |
| 4806 | RRFsRSPIRLFFRKNLLRLTG |
| 4807 | RRFsRsPIRRFFRKNLLRLTG |
| 4808 | RRFsRSPIRRFFRKNLLRLTG |
| 4809 | RRFsRsPIRYFFRKNLLRLTG |
| 4810 | RRFsRSPIRYFFRKNLLRLTG |
| 4811 | RRFsRsPIYFFRKNLLRLTG |
| 4812 | RRFsRSPIYFFRKNLLRLTG |
| 4813 | RRFsRSPKFFRKNLLRLTG |
| 4814 | RRFSsPPRRMFFRKNLLRLTG |
| 4815 | RRFsVSTLRFFRKNLLRLTG |
| 4816 | RRFsVTTMRFFRKNLLRLTG |
| 4817 | RRFtPPSPAFFFRKNLLRLTG |
| 4818 | RRFtPPSPAKFFRKNLLRLTG |
| 4819 | RRFtPPSPARFFRKNLLRLTG |
| 4820 | RRFtPPSPAYFFRKNLLRLTG |
| 4821 | RRGsFEVTLFFRKNLLRLTG |
| 4822 | RRHsASNLHALFFRKNLLRLTG |
| 4823 | RRIDIsPSTFFFRKNLLRLTG |
| 4824 | RRIDIsPSTKFFRKNLLRLTG |
| 4825 | RRIDIsPSTLRFFRKNLLRLTG |
| 4826 | RRIDIsPSTLRKFFRKNLLRLTG |
| 4827 | RRIDIsPSTRFFRKNLLRLTG |
| 4828 | RRIDIsPSTYFFRKNLLRLTG |
| 4829 | RRIsDPEVFFFRKNLLRLTG |
| 4830 | RRIsDPQVFFFRKNLLRLTG |
| 4831 | RRIsGVDRFFFRKNLLRLTG |
| 4832 | RRIsGVDRKFFRKNLLRLTG |
| 4833 | RRIsGVDRLFFRKNLLRLTG |
| 4834 | RRIsGVDRMFFRKNLLRLTG |
| 4835 | RRIsGVDRRFFRKNLLRLTG |
| 4836 | RRIsGVDRYFFRKNLLRLTG |
| 4837 | RRIsGVDRYFFFRKNLLRLTG |
| 4838 | RRIsGVDRYKFFRKNLLRLTG |
| 4839 | RRIsGVDRYLFFRKNLLRLTG |
| 4840 | RRIsGVDRYRFFRKNLLRLTG |
| 4841 | RRIsGVDRYYFFRKNLLRLTG |
| 4842 | RRIsPAPQRFFRKNLLRLTG |
| 4843 | RRIsQIQQLFFRKNLLRLTG |
| 4844 | RRKsOVAEFFFRKNLLRLTG |
| 4845 | RRKsOVAEKFFRKNLLRLTG |
| 4846 | RRKsPPPSFFFRKNLLRLTG |
| 4847 | RRKsPPPSKFFRKNLLRLTG |
| 4848 | RRKsPPPSLFFRKNLLRLTG |
| 4849 | RRKsPPPSMFFRKNLLRLTG |
| 4850 | RRKsPPPSRFFRKNLLRLTG |
| 4851 | RRKsQLDSFFFRKNLLRLTG |
| 4852 | RRKsQLDSKFFRKNLLRLTG |
| 4853 | RRKsQLDSLFFRKNLLRLTG |
| 4854 | RRKsQLDSMFFRKNLLRLTG |
| 4855 | RRKsQLDSRFFRKNLLRLTG |
| 4856 | RRKsQLDSYFFRKNLLRLTG |
| 4857 | RRKsQVAEFFFRKNLLRLTG |
| 4858 | RRKsQVAEKFFRKNLLRLTG |
| 4859 | RRKsQVAELFFRKNLLRLTG |
| 4860 | RRKsQVAEMFFRKNLLRLTG |
| 4861 | RRKsQVAERFFRKNLLRLTG |
| 4862 | RRKsQVAEVFFRKNLLRLTG |
| 4863 | RRKsQVAEYFFRKNLLRLTG |
| 4864 | RRLGsPHRFFFRKNLLRLTG |
| 4865 | RRLGsPHRKFFRKNLLRLTG |
| 4866 | RRLGsPHRLFFRKNLLRLTG |
| 4867 | RRLGsPHRMFFRKNLLRLTG |
| 4868 | RRLGsPHRRFFRKNLLRLTG |
| 4869 | RRLsADIRFFFRKNLLRLTG |
| 4870 | RRLsADIRKFFRKNLLRLTG |
| 4871 | RRLsADIRLFFRKNLLRLTG |
| 4872 | RRLsADIRMFFRKNLLRLTG |
| 4873 | RRLsADIRRFFRKNLLRLTG |
| 4874 | RRLsADIRYFFRKNLLRLTG |
| 4875 | RRLsDSPVFFFRKNLLRLTG |
| 4876 | RRLsELLRYFFRKNLLRLTG |
| 4877 | RRLsERETRFFRKNLLRLTG |
| 4878 | RRLsESSALFFRKNLLRLTG |
| 4879 | RRLsFLVSFFFRKNLLRLTG |
| 4880 | RRLsFLVSKFFRKNLLRLTG |
| 4881 | RRLsFLVSLFFRKNLLRLTG |
| 4882 | RRLsFLVSMFFRKNLLRLTG |
| 4883 | RRLsFLVSRFFRKNLLRLTG |
| 4884 | RRLsFLVSYFFRKNLLRLTG |
| 4885 | RRLsGGSHSFFFRKNLLRLTG |
| 4886 | RRLsGGSHSKFFRKNLLRLTG |
| 4887 | RRLsGGSHSLFFRKNLLRLTG |
| 4888 | RRLsGGSHSMFFRKNLLRLTG |
| 4889 | RRLsGGSHSRFFRKNLLRLTG |
| 4890 | RRLsGGSHSYFFRKNLLRLTG |
| 4891 | RRLsGPLHTFFFRKNLLRLTG |
| 4892 | RRLsGPLHTKFFRKNLLRLTG |
| 4893 | RRLsGPLHTLFFRKNLLRLTG |
| 4894 | RRLsGPLHTMFFRKNLLRLTG |
| 4895 | RRLsGPLHTRFFRKNLLRLTG |
| 4896 | RRLsGPLHTVFFRKNLLRLTG |
| 4897 | RRLsGPLHTYFFRKNLLRLTG |
| 4898 | RRLsLFLNVFFRKNLLRLTG |
| 4899 | RRLsNLPTFFFRKNLLRLTG |
| 4900 | RRLsNLPTKFFRKNLLRLTG |
| 4901 | RRLsNLPTRFFRKNLLRLTG |
| 4902 | RRLsNLPTVFFRKNLLRLTG |
| 4903 | RRLsNLPTYFFRKNLLRLTG |
| 4904 | RRLsPAPOFFFRKNLLRLTG |
| 4905 | RRLsPAPQKFFRKNLLRLTG |
| 4906 | RRLsPAPQLFFRKNLLRLTG |
| 4907 | RRLsPAPQMFFRKNLLRLTG |
| 4908 | RRLsPKASQVFFFRKNLLRLTG |
| 4909 | RRLsPKASQVKFFRKNLLRLTG |
| 4910 | RRLsPKASQVLFFRKNLLRLTG |
| 4911 | RRLsPKASQVMFFRKNLLRLTG |
| 4912 | RRLsPKASQVRFFRKNLLRLTG |
| 4913 | RRLsPVPVPFFFRKNLLRLTG |
| 4914 | RRLsPVPVPKFFRKNLLRLTG |
| 4915 | RRLsPVPVPLFFRKNLLRLTG |
| 4916 | RRLsPVPVPMFFRKNLLRLTG |
| 4917 | RRLsPVPVPRFFRKNLLRLTG |
| 4918 | RRLsRELOKFFRKNLLRLTG |
| 4919 | RRLsRELQFFFRKNLLRLTG |
| 4920 | RRLsRELQLFFRKNLLRLTG |
| 4921 | RRLsRELQMFFRKNLLRLTG |
| 4922 | RRLsRELQRFFRKNLLRLTG |
| 4923 | RRLsRKLSLFFRKNLLRLTG |
| 4924 | RRLsVERIFFFRKNLLRLTG |
| 4925 | RRLsVERIKFFRKNLLRLTG |
| 4926 | RRLsVERIMFFRKNLLRLTG |
| 4927 | RRLsVERIRFFRKNLLRLTG |
| 4928 | RRLsYVLFIFFRKNLLRLTG |
| 4929 | RRLTHLsFFFRKNLLRLTG |
| 4930 | RRLTHLsKFFRKNLLRLTG |
| 4931 | RRLTHLsLFFRKNLLRLTG |
| 4932 | RRLTHLsMFFRKNLLRLTG |
| 4933 | RRLTHLsRFFRKNLLRLTG |
| 4934 | RRMsFQKPFFRKNLLRLTG |
| 4935 | RRMsLLSVFFFRKNLLRLTG |
| 4936 | RRMsLLSVKFFRKNLLRLTG |
| 4937 | RRMsLLSVLFFRKNLLRLTG |
| 4938 | RRMsLLSVMFFRKNLLRLTG |
| 4939 | RRMsLLSVRFFRKNLLRLTG |
| 4940 | RRmsLLSVVFFRKNLLRLTG |
| 4941 | RRMsLLSVVFFRKNLLRLTG |
| 4942 | RRMsLLSVYFFRKNLLRLTG |
| 4943 | RRMsLLSWFFRKNLLRLTG |
| 4944 | RRMsLSVMFFRKNLLRLTG |
| 4945 | RRMsPIKPLFFRKNLLRLTG |
| 4946 | RRMsPKAORFFRKNLLRLTG |
| 4947 | RRMsPKAQFFFRKNLLRLTG |
| 4948 | RRMsPKAQKFFRKNLLRLTG |
| 4949 | RRMsPKAQLFFRKNLLRLTG |
| 4950 | RRMsPKAQMFFRKNLLRLTG |
| 4951 | RRMsPKPFFFRKNLLRLTG |
| 4952 | RRMsPKPKFFRKNLLRLTG |
| 4953 | RRMsPKPMFFRKNLLRLTG |
| 4954 | RRMsPKPRFFRKNLLRLTG |
| 4955 | RRNsAPVSVFFRKNLLRLTG |
| 4956 | RRNsINRNFFFRKNLLRLTG |
| 4957 | RRNsNPVIAEFFFRKNLLRLTG |
| 4958 | RRNsNPVIAEKFFRKNLLRLTG |
| 4959 | RRNsNPVIAELFFRKNLLRLTG |
| 4960 | RRNsNPVIAEMFFRKNLLRLTG |
| 4961 | RRNsNPVIAERFFRKNLLRLTG |
| 4962 | RRNsSERTFFFRKNLLRLTG |
| 4963 | RRNsSERTKFFRKNLLRLTG |
| 4964 | RRNsSERTLFFRKNLLRLTG |
| 4965 | RRNsSERTMFFRKNLLRLTG |
| 4966 | RRNsSERTRFFRKNLLRLTG |
| 4967 | RRNsSERTYFFRKNLLRLTG |
| 4968 | RRNsSIVGFFFRKNLLRLTG |
| 4969 | RRNsSIVGKFFRKNLLRLTG |
| 4970 | RRNsSIVGLFFRKNLLRLTG |
| 4971 | RRNsSIVGMFFRKNLLRLTG |
| 4972 | RRNsSIVGRFFRKNLLRLTG |
| 4973 | RRNsSIVGYFFRKNLLRLTG |
| 4974 | RRNsVFQQGFFFRKNLLRLTG |
| 4975 | RRNsVFQQGKFFRKNLLRLTG |
| 4976 | RRNsVFQQGLFFRKNLLRLTG |
| 4977 | RRNsVFQQGMFFRKNLLRLTG |
| 4978 | RRNsVFQQGRFFRKNLLRLTG |
| 4979 | RRNsVFQQGYFFRKNLLRLTG |
| 4980 | RRPsIAPVLFFRKNLLRLTG |
| 4981 | RRPsLLSEFFFRKNLLRLTG |
| 4982 | RRPsLVHGFFFRKNLLRLTG |
| 4983 | RRPsLVHGKFFRKNLLRLTG |
| 4984 | RRPsLVHGLFFRKNLLRLTG |
| 4985 | RRPsLVHGMFFRKNLLRLTG |
| 4986 | RRPsLVHGRFFRKNLLRLTG |
| 4987 | RRPsLVHGYFFRKNLLRLTG |
| 4988 | RRPsVFERFFFRKNLLRLTG |
| 4989 | RRPsVFERKFFRKNLLRLTG |
| 4990 | RRPsVFERLFFRKNLLRLTG |
| 4991 | RRPsVFERMFFRKNLLRLTG |
| 4992 | RRPsVFERRFFRKNLLRLTG |
| 4993 | RRPsVFERYFFRKNLLRLTG |
| 4994 | RRPsYRKIFFFRKNLLRLTG |
| 4995 | RRPsYRKIKFFRKNLLRLTG |
| 4996 | RRPsYRKILFFRKNLLRLTG |
| 4997 | RRPsYRKIMFFRKNLLRLTG |
| 4998 | RRPsYRKIRFFRKNLLRLTG |
| 4999 | RRPsYRKIYFFRKNLLRLTG |
| 5000 | RRPsYTLGFFFRKNLLRLTG |
| 5001 | RRPsYTLGKFFRKNLLRLTG |
| 5002 | RRPsYTLGLFFRKNLLRLTG |
| 5003 | RRPsYTLGMFFRKNLLRLTG |
| 5004 | RRPsYTLGRFFRKNLLRLTG |
| 5005 | RRPsYTLGVFFRKNLLRLTG |
| 5006 | RRPsYTLGYFFRKNLLRLTG |
| 5007 | RRQsKVEALFFRKNLLRLTG |
| 5008 | RRRsLERLLFFRKNLLRLTG |
| 5009 | RRsFLVSYFFRKNLLRLTG |
| 5010 | RRSFsLEFFRKNLLRLTG |
| 5011 | RRSsFLQFFRKNLLRLTG |
| 5012 | RRssFLQLFFFRKNLLRLTG |
| 5013 | RRssFLQVFFFRKNLLRLTG |
| 5014 | RRSsFLQVFFFRKNLLRLTG |
| 5015 | RRSsFLQVKFFRKNLLRLTG |
| 5016 | RRSsFLQVLFFRKNLLRLTG |
| 5017 | RRssFLQVMFFRKNLLRLTG |
| 5018 | RRSsFLQVMFFRKNLLRLTG |
| 5019 | RRSsFLQVRFFRKNLLRLTG |
| 5020 | RRssFLQVVFFRKNLLRLTG |
| 5021 | RRSsFLQVYFFRKNLLRLTG |
| 5022 | RRSsIGLRFFFRKNLLRLTG |
| 5023 | RRSsIGLRKFFRKNLLRLTG |
| 5024 | RRSsIGLRLFFRKNLLRLTG |
| 5025 | RRSsIGLRMFFRKNLLRLTG |
| 5026 | RRSsIGLRRFFRKNLLRLTG |
| 5027 | RRSsIGLRVFFRKNLLRLTG |
| 5028 | RRSsIGLRYFFRKNLLRLTG |
| 5029 | RRsSIQSTFFFRKNLLRLTG |
| 5030 | RRSsIQSTFFFRKNLLRLTG |
| 5031 | RRSsIQSTKFFRKNLLRLTG |
| 5032 | RRSsIQSTLFFRKNLLRLTG |
| 5033 | RRSsIQSTMFFRKNLLRLTG |
| 5034 | RRSsIQSTRFFRKNLLRLTG |
| 5035 | RRSsIQSTYFFRKNLLRLTG |
| 5036 | RRSsLDAEIDSFFFRKNLLRLTG |
| 5037 | RRSsLDAEIDSLFFRKNLLRLTG |
| 5038 | RRSsLDAEIDSMFFRKNLLRLTG |
| 5039 | RRSsLDAEIDSVFFRKNLLRLTG |
| 5040 | RRsSQSWSFFFRKNLLRLTG |
| 5041 | RRSsQSWSFFFRKNLLRLTG |
| 5042 | RRSsQSWSKFFRKNLLRLTG |
| 5043 | RRsSQSWSLFFRKNLLRLTG |
| 5044 | RRSsQSWSLFFRKNLLRLTG |
| 5045 | RRsSQSWSMFFRKNLLRLTG |
| 5046 | RRSsQSWSMFFRKNLLRLTG |
| 5047 | RRSsQSWSRFFRKNLLRLTG |
| 5048 | RRsSQSWSVFFRKNLLRLTG |
| 5049 | RRSsQSWSYFFRKNLLRLTG |
| 5050 | RRSsSVAQVFFRKNLLRLTG |
| 5051 | RRSsTASLVKFFFRKNLLRLTG |
| 5052 | RRSsTASLVKKFFRKNLLRLTG |
| 5053 | RRSsTASLVKLFFRKNLLRLTG |
| 5054 | RRSsTASLVKMFFRKNLLRLTG |
| 5055 | RRSsTASLVKRFFRKNLLRLTG |
| 5056 | RRsSVDLGFFFRKNLLRLTG |
| 5057 | RRSsVDLGFFFRKNLLRLTG |
| 5058 | RRsSVDLGKFFRKNLLRLTG |
| 5059 | RRSsVDLGKFFRKNLLRLTG |
| 5060 | RRsSVDLGLFFRKNLLRLTG |
| 5061 | RRSsVDLGLFFRKNLLRLTG |
| 5062 | RRsSVDLGMFFRKNLLRLTG |
| 5063 | RRSsVDLGMFFRKNLLRLTG |
| 5064 | RRsSVDLGRFFRKNLLRLTG |
| 5065 | RRSsVDLGRFFRKNLLRLTG |
| 5066 | RRsSVDLGYFFRKNLLRLTG |
| 5067 | RRSsVDLGYFFRKNLLRLTG |
| 5068 | RRSsVKVEAFFRKNLLRLTG |
| 5069 | RRSsVKVEFFFRKNLLRLTG |
| 5070 | RRSsVKVEKFFRKNLLRLTG |
| 5071 | RRSsVKVELFFRKNLLRLTG |
| 5072 | RRSsVKVEMFFRKNLLRLTG |
| 5073 | RRSsVKVERFFRKNLLRLTG |
| 5074 | RRSsVKVEYFFRKNLLRLTG |
| 5075 | RRTsPITRFFFRKNLLRLTG |
| 5076 | RRTsPITRKFFRKNLLRLTG |
| 5077 | RRTsPITRLFFRKNLLRLTG |
| 5078 | RRTsPITRMFFRKNLLRLTG |
| 5079 | RRTsPITRRFFRKNLLRLTG |
| 5080 | RRVVQRSsFFFRKNLLRLTG |
| 5081 | RRVVQRSsKFFRKNLLRLTG |
| 5082 | RRVVQRSsLFFRKNLLRLTG |
| 5083 | RRVVQRSsMFFRKNLLRLTG |
| 5084 | RRVVQRSsRFFRKNLLRLTG |
| 5085 | RRVVQRSsYFFRKNLLRLTG |
| 5086 | RRWQRSsLFFRKNLLRLTG |
| 5087 | RRYsGKTEFFFRKNLLRLTG |
| 5088 | RRYsGKTEKFFRKNLLRLTG |
| 5089 | RRYsGKTELFFRKNLLRLTG |
| 5090 | RRYsGKTERFFRKNLLRLTG |
| 5091 | RRYsGKTEYFFRKNLLRLTG |
| 5092 | RRYsGNMEFFFRKNLLRLTG |
| 5093 | RRYsGNMEKFFRKNLLRLTG |
| 5094 | RRYsGNMELFFRKNLLRLTG |
| 5095 | RRYsGNMEMFFRKNLLRLTG |
| 5096 | RRYsGNMERFFRKNLLRLTG |
| 5097 | RRYsKFFDLFFRKNLLRLTG |
| 5098 | RRYsPPIERFFRKNLLRLTG |
| 5099 | RRYsPPIQFFRKNLLRLTG |
| 5100 | RRYsPPIQFFFRKNLLRLTG |
| 5101 | RRYsPPIQKFFRKNLLRLTG |
| 5102 | RRYsPPIQLFFRKNLLRLTG |
| 5103 | RRYsPPIQMFFRKNLLRLTG |
| 5104 | RRYsPPIQRFFRKNLLRLTG |
| 5105 | RRYsPPIQYFFRKNLLRLTG |
| 5106 | RRYsRsPYSFFFRKNLLRLTG |
| 5107 | RRYsRSPYSFFFRKNLLRLTG |
| 5108 | RRYSRsPYSFFFRKNLLRLTG |
| 5109 | RRYsRsPYSKFFRKNLLRLTG |
| 5110 | RRYsRSPYSKFFRKNLLRLTG |
| 5111 | RRYSRsPYSKFFRKNLLRLTG |
| 5112 | RRYsRsPYSLFFRKNLLRLTG |
| 5113 | RRYsRSPYSLFFRKNLLRLTG |
| 5114 | RRYSRsPYSLFFRKNLLRLTG |
| 5115 | RRYsRsPYSMFFRKNLLRLTG |
| 5116 | RRYsRSPYSMFFRKNLLRLTG |
| 5117 | RRYSRsPYSMFFRKNLLRLTG |
| 5118 | RRYsRsPYSRFFRKNLLRLTG |
| 5119 | RRYsRSPYSRFFRKNLLRLTG |
| 5120 | RRYSRsPYSRFFRKNLLRLTG |
| 5121 | RRYtNRVVTKFFRKNLLRLTG |
| 5122 | RRYtNRVVTLFFRKNLLRLTG |
| 5123 | RRYtNRVVTMFFRKNLLRLTG |
| 5124 | RRYtNRVVTRFFRKNLLRLTG |
| 5125 | RSAsFSRKVFFRKNLLRLTG |
| 5126 | RSAsPDDDLGSSNFFRKNLLRLTG |
| 5127 | RSAsSATQVHKFFRKNLLRLTG |
| 5128 | RSAsSATQVHYFFRKNLLRLTG |
| 5129 | RSDPSKsPGSLRYFFRKNLLRLTG |
| 5130 | RSDsPKIDLFFRKNLLRLTG |
| 5131 | RSDsPKIDYFFRKNLLRLTG |
| 5132 | RSDsRAQAVFFRKNLLRLTG |
| 5133 | RSDsRAQAYFFRKNLLRLTG |
| 5134 | RSDsVGENLFFRKNLLRLTG |
| 5135 | RSDsVGENYFFRKNLLRLTG |
| 5136 | RSDsYVELFFRKNLLRLTG |
| 5137 | RSDsYVELSQYFFRKNLLRLTG |
| 5138 | RSEPSKsPGSLRYFFRKNLLRLTG |
| 5139 | RSEsKDRKFFFRKNLLRLTG |
| 5140 | RSEsKDRKLFFRKNLLRLTG |
| 5141 | RSEsKDRKMFFRKNLLRLTG |
| 5142 | RSEsKDRKVFFRKNLLRLTG |
| 5143 | RSEsPKIDLFFRKNLLRLTG |
| 5144 | RSEsPKIDYFFRKNLLRLTG |
| 5145 | RSEsPPAELFFRKNLLRLTG |
| 5146 | RSEsRAQAVFFRKNLLRLTG |
| 5147 | RSEsRAQAYFFRKNLLRLTG |
| 5148 | RSEsVGENLFFRKNLLRLTG |
| 5149 | RSEsVGENYFFRKNLLRLTG |
| 5150 | RSEsYVELSQYFFRKNLLRLTG |
| 5151 | RSFsPTMKVFFRKNLLRLTG |
| 5152 | RSGsLERKFFFRKNLLRLTG |
| 5153 | RSGsLERKLFFRKNLLRLTG |
| 5154 | RSGsLERKMFFRKNLLRLTG |
| 5155 | RSGsLERKVFFRKNLLRLTG |
| 5156 | RSHSsPASLFFRKNLLRLTG |
| 5157 | RSIsVGENLFFRKNLLRLTG |
| 5158 | RSLsESYELFFRKNLLRLTG |
| 5159 | RSLsPGGAAFFRKNLLRLTG |
| 5160 | RSLsPGGAFFFRKNLLRLTG |
| 5161 | RSLsPGGALFFRKNLLRLTG |
| 5162 | RSLsPGGAMFFRKNLLRLTG |
| 5163 | RSLsPGGAVFFRKNLLRLTG |
| 5164 | RSLsPLLFFFRKNLLRLTG |
| 5165 | RSLsPLLLFFRKNLLRLTG |
| 5166 | RSLsPLLMFFRKNLLRLTG |
| 5167 | RSLsPLLVFFRKNLLRLTG |
| 5168 | RSLsQELVGVFFRKNLLRLTG |
| 5169 | RSLsVEIVKFFRKNLLRLTG |
| 5170 | RSLsVEIVYFFRKNLLRLTG |
| 5171 | RSMsMPVAHFFRKNLLRLTG |
| 5172 | RSMsMPVAKFFRKNLLRLTG |
| 5173 | RsPEDEYELLMPHRISSHFFRKNLLRLTG |
| 5174 | RSRRsPLLKFFRKNLLRLTG |
| 5175 | RSRRsPLLYFFRKNLLRLTG |
| 5176 | RSRsPLELFFRKNLLRLTG |
| 5177 | RSRsPPPVSKFFRKNLLRLTG |
| 5178 | RSRsPPPVSYFFRKNLLRLTG |
| 5179 | RSRsPRPAFFFRKNLLRLTG |
| 5180 | RSRsPRPAIFFRKNLLRLTG |
| 5181 | RSRsPRPALFFRKNLLRLTG |
| 5182 | RSRsPRPAMFFRKNLLRLTG |
| 5183 | RSRsPRPAVFFRKNLLRLTG |
| 5184 | RSRsPRPAXFFRKNLLRLTG |
| 5185 | RSRTsPITRRFFRKNLLRLTG |
| 5186 | RSRTsPITRYFFRKNLLRLTG |
| 5187 | RSSsLIRHKFFRKNLLRLTG |
| 5188 | RSSsLIRHYFFRKNLLRLTG |
| 5189 | RSVsLSMRKFFRKNLLRLTG |
| 5190 | RSVsLSMRYFFRKNLLRLTG |
| 5191 | RsWKYNQSISLRRPFFRKNLLRLTG |
| 5192 | RSYsGSRsKFFRKNLLRLTG |
| 5193 | RSYsGSRsRFFRKNLLRLTG |
| 5194 | RSYsGSRsYFFRKNLLRLTG |
| 5195 | RSYsPDHRQKFFRKNLLRLTG |
| 5196 | RSYsPDHRQYFFRKNLLRLTG |
| 5197 | RSYsPERSKFFRKNLLRLTG |
| 5198 | RSYsPERSYFFRKNLLRLTG |
| 5199 | RSYsPRNSRFFRKNLLRLTG |
| 5200 | RSYsPRNSYFFRKNLLRLTG |
| 5201 | RSYSRsFSKFFRKNLLRLTG |
| 5202 | RSYsRSFSRFFRKNLLRLTG |
| 5203 | RSYSRsFSRFFRKNLLRLTG |
| 5204 | RSYSRsFSYFFRKNLLRLTG |
| 5205 | RSYsYPRQKFFRKNLLRLTG |
| 5206 | RSYsYPRQYFFRKNLLRLTG |
| 5207 | RSYVTTSTRTYsLGFFRKNLLRLTG |
| 5208 | RTAsFAVRKFFRKNLLRLTG |
| 5209 | RTAsFAVRYFFRKNLLRLTG |
| 5210 | RTAsLIIKVFFRKNLLRLTG |
| 5211 | RTAsPPPPPKFFRKNLLRLTG |
| 5212 | RTDPSKsPGSLRYFFRKNLLRLTG |
| 5213 | RTDsPKIDLFFRKNLLRLTG |
| 5214 | RTDsPKIDYFFRKNLLRLTG |
| 5215 | RTDsRAQAVFFRKNLLRLTG |
| 5216 | RTDsRAQAYFFRKNLLRLTG |
| 5217 | RTDsYVELSQYFFRKNLLRLTG |
| 5218 | RTEPSKsPGSLRYFFRKNLLRLTG |
| 5219 | RTEsDSGLKFFFRKNLLRLTG |
| 5220 | RTEsDSGLKKFFRKNLLRLTG |
| 5221 | RTEsDSGLKLFFRKNLLRLTG |
| 5222 | RTEsDSGLKMFFRKNLLRLTG |
| 5223 | RTEsDSGLKVFFRKNLLRLTG |
| 5224 | RTEsPKIDLFFRKNLLRLTG |
| 5225 | RTEsPKIDYFFRKNLLRLTG |
| 5226 | RTEsRAQAVFFRKNLLRLTG |
| 5227 | RTEsRAQAYFFRKNLLRLTG |
| 5228 | RTEsYVELSQYFFRKNLLRLTG |
| 5229 | RTFsLDTILFFRKNLLRLTG |
| 5230 | RTFsPTYGFFFRKNLLRLTG |
| 5231 | RTFsPTYGLFFRKNLLRLTG |
| 5232 | RTFsPTYGMFFRKNLLRLTG |
| 5233 | RTFsPTYGVFFRKNLLRLTG |
| 5234 | RTHsLLLLLFFRKNLLRLTG |
| 5235 | RTLsHISEAFFRKNLLRLTG |
| 5236 | RTLsHISEVFFRKNLLRLTG |
| 5237 | RTLsPEIITVFFRKNLLRLTG |
| 5238 | RTMsEAALVRKFFRKNLLRLTG |
| 5239 | RTNsPGFQKFFRKNLLRLTG |
| 5240 | RTPsDVKELFFRKNLLRLTG |
| 5241 | RTPsFLKKNKFFRKNLLRLTG |
| 5242 | RTPsFLKKNYFFRKNLLRLTG |
| 5243 | RTRsLSSLREKFFRKNLLRLTG |
| 5244 | RTRsLSSLREYFFRKNLLRLTG |
| 5245 | RTRsPSPTFFFRKNLLRLTG |
| 5246 | RTRsPSPTLFFRKNLLRLTG |
| 5247 | RTRsPSPTMFFRKNLLRLTG |
| 5248 | RTRsPSPTVFFRKNLLRLTG |
| 5249 | RTSsFALNLFFRKNLLRLTG |
| 5250 | RTSsFTEQLFFRKNLLRLTG |
| 5251 | RTSsFTFQNFFRKNLLRLTG |
| 5252 | RTSSFtFQNFFRKNLLRLTG |
| 5253 | RTSsPLFNKFFRKNLLRLTG |
| 5254 | RTYKsPLRHFFRKNLLRLTG |
| 5255 | RTYKsPLRKFFRKNLLRLTG |
| 5256 | RTYKsPLRYFFRKNLLRLTG |
| 5257 | RTYsGPMNKFFRKNLLRLTG |
| 5258 | RTYsGPMNKVFFRKNLLRLTG |
| 5259 | RTYsHGTYRFFRKNLLRLTG |
| 5260 | RVAsFAVRKFFRKNLLRLTG |
| 5261 | RVAsFAVRYFFRKNLLRLTG |
| 5262 | RVAsPLVHKFFRKNLLRLTG |
| 5263 | RVAsPLVHYFFRKNLLRLTG |
| 5264 | RVAsPPPPPKFFRKNLLRLTG |
| 5265 | RVAsPPPPPYFFRKNLLRLTG |
| 5266 | RVAsPTSGVFFRKNLLRLTG |
| 5267 | RVAsPTSGVKFFRKNLLRLTG |
| 5268 | RVAsPTSGVKKFFRKNLLRLTG |
| 5269 | RVAsPTSGVKRFFRKNLLRLTG |
| 5270 | RVAsPTSGVYFFRKNLLRLTG |
| 5271 | RVDsPSHGLFFRKNLLRLTG |
| 5272 | RVGsLVLNLFFRKNLLRLTG |
| 5273 | RVIsGVLQLFFRKNLLRLTG |
| 5274 | RVKLPsGSKKFFRKNLLRLTG |
| 5275 | RVKsPGsGHVKFFRKNLLRLTG |
| 5276 | RVKsPGsGHVYFFRKNLLRLTG |
| 5277 | RVKsPISLKFFRKNLLRLTG |
| 5278 | RVKsPSPKSERFFRKNLLRLTG |
| 5279 | RVKsPSPKSEYFFRKNLLRLTG |
| 5280 | RVKtPTSQSYKFFRKNLLRLTG |
| 5281 | RVKtPTSQSYRFFRKNLLRLTG |
| 5282 | RVKtPTSQSYYFFRKNLLRLTG |
| 5283 | RVKTtPLRRFFRKNLLRLTG |
| 5284 | RVKTtPLRYFFRKNLLRLTG |
| 5285 | RVLDRSPsRSAKFFRKNLLRLTG |
| 5286 | RVLDRSPsRSAYFFRKNLLRLTG |
| 5287 | RVLHsPPAVFFRKNLLRLTG |
| 5288 | RVLsGVVTKFFRKNLLRLTG |
| 5289 | RVLsPLIIKFFRKNLLRLTG |
| 5290 | RVPsLLVLLFFRKNLLRLTG |
| 5291 | RVPsSTLKKFFRKNLLRLTG |
| 5292 | RVPsSTLKYFFRKNLLRLTG |
| 5293 | RVRKLPsTTLFFRKNLLRLTG |
| 5294 | RVRQsPLATKFFRKNLLRLTG |
| 5295 | RVRQsPLATRFFRKNLLRLTG |
| 5296 | RVRQsPLATYFFRKNLLRLTG |
| 5297 | RVRRsSFLNAKFFRKNLLRLTG |
| 5298 | RVRsLSSLREKFFRKNLLRLTG |
| 5299 | RVRsLSSLREYFFRKNLLRLTG |
| 5300 | RVRsPTRSFFFRKNLLRLTG |
| 5301 | RVRsPTRSLFFRKNLLRLTG |
| 5302 | RVRsPTRSMFFRKNLLRLTG |
| 5303 | RVRsPTRSPFFRKNLLRLTG |
| 5304 | RVRsPTRSVFFRKNLLRLTG |
| 5305 | RVSsPISKKFFRKNLLRLTG |
| 5306 | RVSsPISKYFFRKNLLRLTG |
| 5307 | RVSsRFSSKFFRKNLLRLTG |
| 5308 | RVSsRFSSRFFRKNLLRLTG |
| 5309 | RVSsRFSSYFFRKNLLRLTG |
| 5310 | RVSsVKLISKFFRKNLLRLTG |
| 5311 | RVSsVKLISYFFRKNLLRLTG |
| 5312 | RVTsAEIKLFFRKNLLRLTG |
| 5313 | RVVsLSMRKFFRKNLLRLTG |
| 5314 | RVVsLSMRYFFRKNLLRLTG |
| 5315 | RVWEDRPSsAFFRKNLLRLTG |
| 5316 | RVWsPPRVHKVFFRKNLLRLTG |
| 5317 | RVYQyIQSRFFRKNLLRLTG |
| 5318 | RVYQyIQSRFKFFRKNLLRLTG |
| 5319 | RVYQyIQSRFYFFRKNLLRLTG |
| 5320 | RVYQyIQSRKFFRKNLLRLTG |
| 5321 | RVYQyIQSRYFFRKNLLRLTG |
| 5322 | RVYsPYNHKFFRKNLLRLTG |
| 5323 | RVYsPYNHRFFRKNLLRLTG |
| 5324 | RVYsPYNHYFFRKNLLRLTG |
| 5325 | RVYSRsFSKFFRKNLLRLTG |
| 5326 | RVYSRsFSYFFRKNLLRLTG |
| 5327 | RYPsNLQLFFFRKNLLRLTG |
| 5328 | RYQtQPVTLFFRKNLLRLTG |
| 5329 | SAARESHPHGVKRSAsPDDDLGFFRKNLLRLTG |
| 5330 | SARGsPTRPNPPVRFFRKNLLRLTG |
| 5331 | SARRtPVSYFFRKNLLRLTG |
| 5332 | sDDEKMPDLEFFRKNLLRLTG |
| 5333 | sDFHAERAAREKFFRKNLLRLTG |
| 5334 | SDmPRAHsFFFRKNLLRLTG |
| 5335 | SDMPRAHsFFFRKNLLRLTG |
| 5336 | SEFKAMDsIFFRKNLLRLTG |
| 5337 | SEGsLHRKFFFRKNLLRLTG |
| 5338 | SEGsLHRKWFFRKNLLRLTG |
| 5339 | SEGsLHRKYFFRKNLLRLTG |
| 5340 | SELsPGRSVFFRKNLLRLTG |
| 5341 | SFDsGSVRLFFRKNLLRLTG |
| 5342 | SGGAQsPLRYLHVLFFRKNLLRLTG |
| 5343 | sGGDDDWTHLSSKEVDPSTFFRKNLLRLTG |
| 5344 | sGGDDDWTHLSSKEVDPSTGFFRKNLLRLTG |
| 5345 | sGGDDDWTHLSSKEVDPSTGEFFRKNLLRLTG |
| 5346 | sGGDDDWTHLSSKEVDPSTGELFFRKNLLRLTG |
| 5347 | sGGDDDWTHLSSKEVDPSTGELQFFRKNLLRLTG |
| 5348 | SGPKPLFRRMsSLVGPTQFFRKNLLRLTG |
| 5349 | SIDsPQKLFFRKNLLRLTG |
| 5350 | SIDsPQKYFFRKNLLRLTG |
| 5351 | SILsFVSGLFFRKNLLRLTG |
| 5352 | SIMsFHIDLFFRKNLLRLTG |
| 5353 | SImsPEIQLFFRKNLLRLTG |
| 5354 | SIMsPEIQLFFRKNLLRLTG |
| 5355 | SIPtVSGQIFFRKNLLRLTG |
| 5356 | SISsMEVNVFFRKNLLRLIG |
| 5357 | SISStPPAVFFRKNLLRLTG |
| 5358 | SKEDKNGHDGDTHQEDDGEKsDFFRKNLLRLTG |
| 5359 | SKRGyIGLFFRKNLLRLTG |
| 5360 | SKtVATFILFFRKNLLRLTG |
| 5361 | SLAsLTE,KIFFRKNLLRLTG |
| 5362 | SLDSEDYsLFFRKNLLRLTG |
| 5363 | SLDsLGDVFLFFRKNLLRLTG |
| 5364 | SLDsPSYVLYFFRKNLLRLTG |
| 5365 | SLEsPSYVLYFFRKNLLRLTG |
| 5366 | SLFGGsVKLFFRKNLLRLTG |
| 5367 | SLFKRLYsLFFRKNLLRLTG |
| 5368 | SLFsGDEENAFFRKNLLRLTG |
| 5369 | SLFsGSYSSLFFRKNLLRLTG |
| 5370 | SLFsPQNTLFFRKNLLRLTG |
| 5371 | SLFsPRRNKFFRKNLLRLTG |
| 5372 | SLFsPRRNYFFRKNLLRLTG |
| 5373 | SLFsSEESNLFFRKNLLRLTG |
| 5374 | SLFsSEESNLGAFFRKNLLRLTG |
| 5375 | SLHDIQLsLFFRKNLLRLTG |
| 5376 | SLKsPVTVKFFRKNLLRLTG |
| 5377 | SLLAsPGHISVFFRKNLLRLTG |
| 5379 | SLLNKSsPVKFFRKNLLRLTG |
| 5380 | SLLNKSsPVKKFFRKNLLRLTG |
| 5381 | SLLNKSsPVKYFFRKNLLRLTG |
| 5382 | SLLsLHVDLFFRKNLLRLTG |
| 5383 | SLLTsPPKAFFRKNLLRLTG |
| 5384 | SLLTsPPKVFFRKNLLRLTG |
| 5385 | SLMsGTLESLFFRKNLLRLTG |
| 5386 | SLMsPGRRKFFRKNLLRLTG |
| 5387 | SLMsPGRRYFFRKNLLRLTG |
| 5388 | SLQPRSHsVFFRKNLLRLTG |
| 5389 | SLQsLETSVFFRKNLLRLTG |
| 5390 | SLRRsVLMKFFRKNLLRLTG |
| 5391 | SLRRsVLMYFFRKNLLRLTG |
| 5392 | SLSsLLVKLFFRKNLLRLTG |
| 5393 | SLtRSPPRVFFRKNLLRLTG |
| 5394 | SLTRsPPRVFFRKNLLRLTG |
| 5395 | SLVDGyFRLFFRKNLLRLTG |
| 5396 | SLYDRPAsYFFRKNLLRLTG |
| 5397 | SLYsPVKKKFFRKNLLRLTG |
| 5398 | SMFsPRRNKFFRKNLLRLTG |
| 5399 | SMKsPVTVKFFRKNLLRLTG |
| 5400 | SMLNKSsPVKFFRKNLLRLTG |
| 5401 | SMLNKSsPVKKFFRKNLLRLTG |
| 5402 | SMLsQEIQTLFFRKNLLRLTG |
| 5403 | SMLTsPPKAFFRKNLLRLTG |
| 5404 | SMLTsPPKVFFRKNLLRLTG |
| 5405 | SMMsPGRRKFFRKNLLRLTG |
| 5406 | SMQPRSHsVFFRKNLLRLTG |
| 5407 | SMRRsVLMKFFRKNLLRLTG |
| 5408 | SMSsLSREVFFRKNLLRLTG |
| 5409 | SMtRSPPRVFFRKNLLRLTG |
| 5410 | SMTRsPPRVFFRKNLLRLTG |
| 5411 | SMYsPVKKKFFRKNLLRLTG |
| 5412 | SNFKsPVKTIRFFRKNLLRLTG |
| 5413 | SPAASISRLsGEQVDGKGFFRKNLLRLTG |
| 5414 | SPAsPKISFFFRKNLLRLTG |
| 5415 | SPAsPKISLFFRKNLLRLTG |
| 5416 | SPAsPKISMFFRKNLLRLTG |
| 5417 | SPAsPKISVFFRKNLLRLTG |
| 5418 | SPDsSQSSLFFRKNLLRLTG |
| 5419 | sPEDEYELLMPHRISSHFFRKNLLRLTG |
| 5420 | SPEDEYELLMPHRIsSHFFRKNLLRLTG |
| 5421 | SPEKAGRRsSFFFRKNLLRLTG |
| 5422 | SPEKAGRRsSLFFRKNLLRLTG |
| 5423 | SPEKAGRRsSMFFRKNLLRLTG |
| 5424 | SPEKAGRRsSVFFRKNLLRLTG |
| 5425 | sPERPFLATLGGAKVADKFFRKNLLRLTG |
| 5426 | sPERPFLATLGGAKVADKIQFFRKNLLRLTG |
| 5427 | SPFKRQLsFFFRKNLLRLTG |
| 5428 | SPFKRQLsLFFRKNLLRLTG |
| 5429 | SPFKRQLsMFFRKNLLRLTG |
| 5430 | SPFKRQLsVFFRKNLLRLTG |
| 5431 | SPFLsKRSLFFRKNLLRLTG |
| 5432 | SPGLARKRsFFFRKNLLRLTG |
| 5433 | SPGLARKRsLFFRKNLLRLTG |
| 5434 | SPGLARKRsMFFRKNLLRLTG |
| 5435 | SPGLARKRsVFFRKNLLRLTG |
| 5436 | SPGsPRPAFFFRKNLLRLTG |
| 5437 | SPGsPRPALFFRKNLLRLTG |
| 5438 | SPGsPRPAMFFRKNLLRLTG |
| 5439 | SPGsPRPAVFFRKNLLRLTG |
| 5440 | SPKsPGLKAFFRKNLLRLTG |
| 5441 | SPKsPGLKFFFRKNLLRLTG |
| 5442 | SPKsPGLKLFFRKNLLRLTG |
| 5443 | SPKsPGLKMFFRKNLLRLTG |
| 5444 | SPKsPGLKVFFRKNLLRLTG |
| 5445 | SPKsPTAAFFFRKNLLRLTG |
| 5446 | SPKsPTAALFFRKNLLRLTG |
| 5447 | SPKsPTAAMFFRKNLLRLTG |
| 5448 | SPKsPTAAVFFRKNLLRLTG |
| 5449 | SPLTKSIsLFFRKNLLRLTG |
| 5450 | sPPFPVPVYTRQAPKQVIKFFRKNLLRLTG |
| 5451 | SPRAPVsPLKFFFRKNLLRLTG |
| 5452 | SPRERsPALFFRKNLLRLTG |
| 5453 | SPRGEAsSLFFRKNLLRLTG |
| 5454 | SPRGEASsLFFRKNLLRLTG |
| 5455 | SPRPPNsPSIFFRKNLLRLTG |
| 5456 | SPRRsLGLALFFRKNLLRLTG |
| 5457 | SPRRsRSIsFFFRKNLLRLTG |
| 5458 | SPRRsRSISFFFRKNLLRLTG |
| 5459 | SPRRsRSIsLFFRKNLLRLTG |
| 5460 | SPRRsRSISLFFRKNLLRLTG |
| 5461 | SPRRsRSIsMFFRKNLLRLTG |
| 5462 | SPRRsRSISMFFRKNLLRLTG |
| 5463 | SPRRsRSIsVFFRKNLLRLTG |
| 5464 | SPRRsRSISVFFRKNLLRLTG |
| 5465 | SPRsITSTFFFRKNLLRLTG |
| 5466 | SPRsITSTLFFRKNLLRLTG |
| 5467 | SPRsITSTMFFRKNLLRLTG |
| 5468 | SPRsITSTPFFRKNLLRLTG |
| 5469 | SPRsITSTVFFRKNLLRLTG |
| 5470 | SPRsPDRTLFFRKNLLRLTG |
| 5471 | SPRsPGKPFFFRKNLLRLTG |
| 5472 | SPRsPGKPLFFRKNLLRLTG |
| 5473 | SPRsPGKPMFFRKNLLRLTG |
| 5474 | SPRsPGKPVFFRKNLLRLTG |
| 5475 | SPRsPGRSFFFRKNLLRLTG |
| 5476 | SPRsPGRSIFFRKNLLRLTG |
| 5477 | SPRsPGRSLFFRKNLLRLTG |
| 5478 | SPRsPGRSMFFRKNLLRLTG |
| 5479 | SPRsPGRSVFFRKNLLRLTG |
| 5480 | SPRsPGRSXFFRKNLLRLTG |
| 5481 | SPRsPSGLRFFRKNLLRLTG |
| 5482 | SPRsPSTTYFFFRKNLLRLTG |
| 5483 | SPRsPSTTYLFFRKNLLRLTG |
| 5484 | SPRSPsTTYLFFRKNLLRLTG |
| 5485 | SPRsPSTTYMFFRKNLLRLTG |
| 5486 | SPRsPSTTYVFFRKNLLRLTG |
| 5487 | SPRssQLVFFRKNLLRLTG |
| 5488 | SPRtPVsPVKFFFRKNLLRLTG |
| 5489 | SPRTPVsPVKFFFRKNLLRLTG |
| 5490 | SPRtPVsPVKLFFRKNLLRLTG |
| 5491 | SPRTPVsPVKLFFRKNLLRLTG |
| 5492 | SPRtPVsPVKMFFRKNLLRLTG |
| 5493 | SPRTPVsPVKMFFRKNLLRLTG |
| 5494 | SPRtPVsPVKVFFRKNLLRLTG |
| 5495 | SPRTPVsPVKVFFRKNLLRLTG |
| 5496 | SPSsPSVRRQFFFRKNLLRLTG |
| 5497 | SPSsPSVRRQLFFRKNLLRLTG |
| 5498 | SPSsPSVRRQMFFRKNLLRLTG |
| 5499 | SPSsPSVRRQVFFRKNLLRLTG |
| 5500 | SPSTSRSGGsSRFFFRKNLLRLTG |
| 5501 | SPSTSRSGGsSRLFFRKNLLRLTG |
| 5502 | SPSTSRSGGsSRMFFRKNLLRLTG |
| 5503 | SPSTSRSGGsSRVFFRKNLLRLTG |
| 5504 | sPTRPNPPVRNLHFFRKNLLRLTG |
| 5505 | SPVsPMKELFFRKNLLRLTG |
| 5506 | SPVsTRPLEPFFRKNLLRLTG |
| 5507 | SPVStRPLEPFFRKNLLRLTG |
| 5508 | SPVVHQsFFFRKNLLRLTG |
| 5509 | SPVVHQsLFFRKNLLRLTG |
| 5510 | SPVVHQsMFFRKNLLRLTG |
| 5511 | SPVVHQsVFFRKNLLRLTG |
| 5512 | SQIsPKSWGVFFRKNLLRLTG |
| 5513 | SRDKHsEYFFRKNLLRLTG |
| 5514 | SREKHsEIFFRKNLLRLTG |
| 5515 | SREKHsElFFRKNLLRLTG |
| 5516 | SRFNRRVsVFFRKNLLRLTG |
| 5517 | SRLTHLsFFFRKNLLRLTG |
| 5518 | SRLTHLsKFFRKNLLRLTG |
| 5519 | SRLTHLsLFFRKNLLRLTG |
| 5520 | SRLTHLsMFFRKNLLRLTG |
| 5521 | SRLTHLsRFFRKNLLRLTG |
| 5522 | SRLTHLsYFFRKNLLRLTG |
| 5523 | SRMsPKAQFFFRKNLLRLTG |
| 5524 | SRMsPKAQKFFRKNLLRLTG |
| 5525 | SRMsPKAQLFFRKNLLRLTG |
| 5526 | SRMsPKAQMFFRKNLLRLTG |
| 5527 | SRMsPKAQRFFRKNLLRLTG |
| 5528 | SRMsPKAQYFFRKNLLRLTG |
| 5529 | SRsSRSPYSRFFRKNLLRLTG |
| 5530 | SRSsSVLsLFFRKNLLRLTG |
| 5531 | SRSSsVLSLFFRKNLLRLTG |
| 5532 | SRSSSVLsLFFRKNLLRLTG |
| 5533 | SRTsPITRFFFRKNLLRLTG |
| 5534 | SRTsPITRKFFRKNLLRLTG |
| 5535 | SRTsPITRLFFRKNLLRLTG |
| 5536 | SRTsPITRMFFRKNLLRLTG |
| 5537 | SRTsPITRRFFRKNLLRLTG |
| 5538 | SRTsPITRYFFRKNLLRLTG |
| 5539 | SRWsGSHQFFFRKNLLRLTG |
| 5540 | SRWsGSHQKFFRKNLLRLTG |
| 5541 | SRWsGSHQRFFRKNLLRLTG |
| 5542 | SRWsGSHQYFFRKNLLRLTG |
| 5543 | SRYsRsPYSFFFRKNLLRLTG |
| 5544 | SRYsRSPYSFFFRKNLLRLTG |
| 5545 | SRYSRsPYSFFFRKNLLRLTG |
| 5546 | SRYsRsPYSKFFRKNLLRLTG |
| 5547 | SRYsRSPYSKFFRKNLLRLTG |
| 5548 | SRYSRsPYSKFFRKNLLRLTG |
| 5549 | SRYsRsPYSLFFRKNLLRLTG |
| 5550 | SRYsRSPYSLFFRKNLLRLTG |
| 5551 | SRYSRsPYSLFFRKNLLRLTG |
| 5552 | SRYsRsPYSMFFRKNLLRLTG |
| 5553 | SRYsRSPYSMFFRKNLLRLTG |
| 5554 | SRYSRsPYSMFFRKNLLRLTG |
| 5555 | SRYsRsPYSRFFRKNLLRLTG |
| 5556 | SRYsRSPYSRFFRKNLLRLTG |
| 5557 | SRYSRsPYSRFFRKNLLRLTG |
| 5558 | SRYsRsPYSYFFRKNLLRLTG |
| 5559 | SRYsRSPYSYFFRKNLLRLTG |
| 5560 | SRYSRsPYSYFFRKNLLRLTG |
| 5561 | SRYsRtsPYSRFFRKNLLRLTG |
| 5562 | SSDIsPTRLFFRKNLLRLTG |
| 5563 | SSDIsPTRYFFRKNLLRLTG |
| 5564 | SSDKHsEYFFRKNLLRLTG |
| 5565 | SSDPASQLsYFFRKNLLRLTG |
| 5566 | SSDsETLRYFFRKNLLRLTG |
| 5567 | SSDsPQKLFFRKNLLRLTG |
| 5568 | SSDsPQKYFFRKNLLRLTG |
| 5569 | SSDsPSYVLYFFRKNLLRLTG |
| 5570 | SSDsPTNHFFFFRKNLLRLTG |
| 5571 | SSEIsPTRYFFRKNLLRLTG |
| 5572 | SSEKHsEYFFRKNLLRLTG |
| 5573 | SSEPASQLsYFFRKNLLRLTG |
| 5574 | SSEsETLRYFFRKNLLRLTG |
| 5575 | SSEsPQKLFFRKNLLRLTG |
| 5576 | SSEsPQKYFFRKNLLRLTG |
| 5577 | SSEsPSYVLYFFRKNLLRLTG |
| 5578 | SSEsPTNHFYFFRKNLLRLTG |
| 5579 | SSNGMKASRRsEEKEAGFFRKNLLRLTG |
| 5580 | SSNGKMASRRsEEKEAGEIFFRKNLLRLTG |
| 5581 | SsPIMRKKVSLFFRKNLLRLTG |
| 5582 | sSPPFPVPVYTRQAPKQVIKFFRKNLLRLTG |
| 5583 | SSsPTHAKSAHVFFRKNLLRLTG |
| 5584 | SSsWRILGSKQSEHRPFFRKNLLRLTG |
| 5585 | STDIsPTRLFFRKNLLRLTG |
| 5586 | STDIsPTRYFFRKNLLRLTG |
| 5587 | STDKHsEYFFRKNLLRLTG |
| 5588 | STDPASQLsYFFRKNLLRLTG |
| 5589 | STDsETLRYFFRKNLLRLTG |
| 5590 | STDsPQKYFFRKNLLRLTG |
| 5591 | STDsPSYVLYFFRKNLLRLTG |
| 5592 | STDsPTNHFYFFRKNLLRLTG |
| 5593 | STEIsPTRLFFRKNLLRLTG |
| 5594 | STEIsPTRYFFRKNLLRLTG |
| 5595 | STEKHsEYFFRKNLLRLTG |
| 5596 | STEPASQLsYFFRKNLLRLTG |
| 5597 | STEsETLRYFFRKNLLRLTG |
| 5598 | STEsPQKYFFRKNLLRLTG |
| 5599 | STEsPSYVLYFFRKNLLRLTG |
| 5600 | STEsPTNHFYFFRKNLLRLTG |
| 5601 | STIQNsPTKKFFRKNLLRLTG |
| 5602 | sTMSLNIITVFFRKNLLRLTG |
| 5603 | STMsLNIITVFFRKNLLRLTG |
| 5604 | SVDIsPIRLFFRKNLLRLTG |
| 5605 | SVDIsPTRLFFRKNLLRLTG |
| 5606 | SVDIsPTRYFFRKNLLRLTG |
| 5607 | SVFsPSFGLFFRKNLLRLTG |
| 5608 | SVGsDYYIQLFFRKNLLRLTG |
| 5609 | SVKPRRTsLFFRKNLLRLTG |
| 5610 | SVKsPVTVKFFRKNLLRLTG |
| 5611 | SVKsPVTVYFFRKNLLRLTG |
| 5612 | SVLsPSFQLFFRKNLLRLTG |
| 5613 | SVMDsPKKLFFRKNLLRLTG |
| 5614 | SVRRsVLMKFFRKNLLRLTG |
| 5615 | SVRRsVLMYFFRKNLLRLTG |
| 5616 | SVRsLSLSLFFRKNLLRLTG |
| 5617 | SVYsGDFGNLEVFFRKNLLRLTG |
| 5618 | SVYsPVKKKFFRKNLLRLTG |
| 5619 | SVYsPVKKYFFRKNLLRLTG |
| 5620 | sYIEHIFEIFFRKNLLRLTG |
| 5621 | SYPsPVATSYFFRKNLLRLTG |
| 5622 | sYQKVIELFFFRKNLLRLTG |
| 5623 | TDKYsKKMFFRKNLLRLIG |
| 5624 | TEAsPESMLFFRKNLLRLTG |
| 5625 | THKGEIRGASTPFQFRAssPFFRKNLLRLTG |
| 5626 | TIGEKKEPsDKSVDSFFRKNLLRLTG |
| 5627 | TKDKYMASRGQKAKsMEGFFRKNLLRLTG |
| 5628 | TKsVKALSSLHGDDFFRKNLLRLTG |
| 5629 | TKsVKALSSLHGDDQFFRKNLLRLTG |
| 5630 | TKsVKALSSLHGDDQDFFRKNLLRLTG |
| 5631 | TLAsPSVFKSTFFRKNLLRLTG |
| 5632 | TLAsPSVFKSVFFRKNLLRLTG |
| 5633 | TLLAsPMLKFFRKNLLRLTG |
| 5634 | TLMERTVsLFFRKNLLRLTG |
| 5635 | TLSsPPPGLFFRKNLLRLTG |
| 5636 | TMAsPGKDNYFFRKNLLRLTG |
| 5637 | TMAsPSVFKSTFFRKNLLRLTG |
| 5638 | TMAsPSVFKSVFFRKNLLRLTG |
| 5639 | TMDsPGKDNYFFRKNLLRLTG |
| 5640 | TMEsPGKDNYFFRKNLLRLTG |
| 5641 | TMMsPSQFLFFRKNLLRLTG |
| 5642 | TPAQPQRRsFFFRKNLLRLTG |
| 5643 | TPAQPQRRsLFFRKNLLRLTG |
| 5644 | TPAQPQRRsMFFRKNLLRLTG |
| 5645 | TPAQPQRRsVFFRKNLLRLTG |
| 5646 | TPDPSKFFSQLsSEHGGDVFFRKNLLRLTG |
| 5647 | tPDPSKFFSQLSSEHGGDVQFFRKNLLRLTG |
| 5648 | TPIsPGRASGFFFRKNLLRLTG |
| 5649 | TPIsPGRASGLFFRKNLLRLTG |
| 5650 | TPIsPGRASGMFFRKNLLRLTG |
| 5651 | TPIsPGRASGVFFRKNLLRLTG |
| 5652 | TPMKKHLsLFFRKNLLRLTG |
| 5653 | TPRsPPLGFFFRKNLLRLTG |
| 5654 | TPRsPPLGLFFRKNLLRLTG |
| 5655 | TPRsPPLGLFFFRKNLLRLTG |
| 5656 | TPRsPPLGLIFFRKNLLRLTG |
| 5657 | TPRsPPLGLLFFRKNLLRLTG |
| 5658 | TPRsPPLGLMFFRKNLLRLTG |
| 5659 | TPRsPPLGLVFFRKNLLRLTG |
| 5660 | TPRsPPLGMFFRKNLLRLTG |
| 5661 | TPRsPPLGVFFRKNLLRLTG |
| 5662 | TQSSGKsSVFFRKNLLRLTG |
| 5663 | TRKtPESFLFFRKNLLRLTG |
| 5664 | TRLsPAKIVLFFFRKNLLRLTG |
| 5665 | TRLsPAKIVLKFFRKNLLRLTG |
| 5666 | TRLsPAKIVLRFFRKNLLRLTG |
| 5667 | TRLsPAKIVLYFFRKNLLRLTG |
| 5668 | TSAsPGKDNYFFRKNLLRLTG |
| 5669 | TSDsPGKDNYFFRKNLLRLTG |
| 5670 | TSDtPDYLLKYFFRKNLLRLTG |
| 5671 | TSEsPGKDNYFFRKNLLRLTG |
| 5672 | TSEtPDYLLKYFFRKNLLRLTG |
| 5673 | TTAsPGKDNYFFRKNLLRLTG |
| 5674 | TTDsPGKDNYFFRKNLLRLTG |
| 5675 | TTDtPDYLLKYFFRKNLLRLTG |
| 5676 | TTEsPGKDNYFFRKNLLRLTG |
| 5677 | TTEtPDYLLKYFFRKNLLRLTG |
| 5678 | TTKsVKALSSLHGFFRKNLLRLTG |
| 5679 | TTKsVKALSSLHGDDFFRKNLLRLTG |
| 5680 | TTKsVKALSSLHGDDQFFRKNLLRLTG |
| 5681 | TKKsVKALSSHLGDDQDFFRKNLLRLTG |
| 5682 | TTKsVKALSSLHGDDQDSFFRKNLLRLTG |
| 5683 | TTKsVKALSSLHGDDQDsEDFFRKNLLRLTG |
| 5684 | TTKSVKALSSHGDDQDsEDFFRKNLLRLTG |
| 5685 | TTKsVKALSSLHGDDQDsEDEFFRKNLLRLTG |
| 5686 | TTKSVKALSSHGDDQSsEDEFFRKNLLRLTG |
| 5687 | TVFsPTLPAAFFRKNLLRLTG |
| 5688 | TVMsNSSVIHLFFRKNLLRLTG |
| 5689 | VAKRLsLFFRKNLLRLTG |
| 5690 | VAMPVKKSPRRSsSDEQGLSYSSLKNVFFRKNLLRLTG |
| 5691 | VIDsQELSKVFFRKNLLRLTG |
| 5692 | VLDsPASKKFFRKNLLRLTG |
| 5693 | VLFPEsPARAFFRKNLLRLTG |
| 5694 | VLFRtPLASVFFRKNLLRLTG |
| 5695 | VLFsSPPQMFFRKNLLRLTG |
| 5696 | VLFSsPPQMFFRKNLLRLTG |
| 5697 | VLIENVAsLFFRKNLLRLTG |
| 5698 | VLIGsPKKVFFRKNLLRLTG |
| 5699 | VLIGsPKKYFFRKNLLRLTG |
| 5700 | VLKGsRSSELFFRKNLLRLTG |
| 5701 | VLKGsRSSEVFFRKNLLRLTG |
| 5702 | VLKSRKssVTEEFFRKNLLRLTG |
| 5703 | VLKVMIGsPKFFRKNLLRLTG |
| 5704 | VLKVMIGsPKKFFRKNLLRLTG |
| 5705 | VLKVMIGsPKKKFFRKNLLRLTG |
| 5706 | VLLsPVPELFFRKNLLRLTG |
| 5707 | VLLsPVPEVFFRKNLLRLTG |
| 5708 | VLMK(sPs)PALFFRKNLLRLTG |
| 5709 | VLMK(sPs)PAVFFRKNLLRLTG |
| 5710 | VLQtPPYVKFFRKNLLRLTG |
| 5711 | VLQtPPYVKKFFRKNLLRLTG |
| 5712 | VLQtPPYVKYFFRKNLLRLTG |
| 5713 | VLSDVIPsIFFRKNLLRLTG |
| 5714 | VLSSLtPAKVFFRKNLLRLTG |
| 5715 | VLVVDTPsIFFRKNLLRLTG |
| 5716 | VLYsPQMALFFRKNLLRLTG |
| 5717 | VMFRtPLASVFFRKNLLRLTG |
| 5718 | VMIGsKKVFFRKNLLRLTG |
| 5719 | VMIGsPKKVFFRKNLLRLTG |
| 5720 | VMIGsPKKYFFRKNLLRLTG |
| 5721 | VMKVMIGsPKFFRKNLLRLTG |
| 5722 | VMKVMIGsPKKFFRKNLLRLTG |
| 5723 | VMKVMIGsPKKKFFRKNLLRLTG |
| 5724 | VMKVMIGsPKKYFFRKNLLRLTG |
| 5725 | VMLsPVPELFFRKNLLRLTG |
| 5726 | VMLsPVPEVFFRKNLLRLTG |
| 5727 | VMQtPPYVKFFRKNLLRLTG |
| 5728 | VMQtPPYVKKFFRKNLLRLTG |
| 5729 | VPHHGFEDWsQIRFFRKNLLRLTG |
| 5730 | VPKSGRSSsLFFRKNLLRLTG |
| 5731 | VPKsPAFALFFRKNLLRLTG |
| 5732 | VPLIRKKsLFFRKNLLRLTG |
| 5733 | VPNAPPAYEKLsAEQSPPPYFFRKNLLRLTG |
| 5734 | VPREVLRLsFFFRKNLLRLTG |
| 5735 | VPREVLRLsLFFRKNLLRLTG |
| 5736 | VPREVLRLsMFFRKNLLRLTG |
| 5737 | VPREVLRLsVFFRKNLLRLTG |
| 5738 | VPRPERRsSLFFRKNLLRLTG |
| 5739 | VPRsPKHAHSSSFFFRKNLLRLTG |
| 5740 | VPRsPKHAHSSSLFFRKNLLRLTG |
| 5741 | VPRsPKHAHSSSMFFRKNLLRLTG |
| 5742 | VPRsPKHAHSSSVFFRKNLLRLTG |
| 5743 | VPStPKSSLFFRKNLLRLTG |
| 5744 | VPTsPKSSLFFRKNLLRLTG |
| 5745 | VPVsPGQQLFFRKNLLRLTG |
| 5746 | VRAsKDLAQFFRKNLLRLTG |
| 5747 | VRQsVTSFPDADAFHHQFFRKNLLRLTG |
| 5748 | VSKVMIGsPKKVFFRKNLLRLTG |
| 5749 | VSKVMIGsPKKYFFRKNLLRLTG |
| 5750 | VTQtPPYVKKFFRKNLLRLTG |
| 5751 | VTQtPPYVKYFFRKNLLRLTG |
| 5752 | VVDsPGQEVLFFRKNLLRLTG |
| 5753 | VYTyIQSRFFFRKNLLRLTG |
| 5754 | WTHLsSKEVDPSFFRKNLLRLTG |
| 5755 | WTHLsSKEVDPSTGFFRKNLLRLTG |
| 5756 | YARsVHEEFFFRKNLLRLTG |
| 5757 | YAVPRRGsLFFRKNLLRLTG |
| 5758 | YAYDGKDyIFFRKNLLRLTG |
| 5759 | YEGsPIKVFFRKNLLRLTG |
| 5760 | YEKLsAEQSPPPFFRKNLLRLTG |
| 5761 | YFsPFRPYFFRKNLLRLTG |
| 5762 | yIQSRFFFRKNLLRLTG |
| 5763 | YLAsLEKKLFFRKNLLRLTG |
| 5764 | YLDsGIHSGFFRKNLLRLTG |
| 5765 | YLDsGIHsGAFFRKNLLRLTG |
| 5766 | YLDsGIHSGAFFRKNLLRLTG |
| 5767 | YLDsGIHsGVFFRKNLLRLTG |
| 5768 | YLDsGIHSGVFFRKNLLRLTG |
| 5769 | yLGLDVPVFFRKNLLRLTG |
| 5770 | YLGsISTLVTLFFRKNLLRLTG |
| 5771 | YLIHsPMSLFFRKNLLRLTG |
| 5772 | YLLsPLNTLFFRKNLLRLTG |
| 5773 | YLLsPTKLPSIFFRKNLLRLTG |
| 5774 | YLLsPTKLPSVFFRKNLLRLTG |
| 5775 | yLQSRYYRAFFRKNLLRLTG |
| 5776 | YLQsRYYRAFFRKNLLRLTG |
| 5777 | YLSDsDTEAKLFFRKNLLRLTG |
| 5778 | YMDsGIHsGAFFRKNLLRLTG |
| 5779 | YMDsGIHSGAFFRKNLLRLTG |
| 5780 | YMDsGIHsGVFFRKNLLRLTG |
| 5781 | YMDsGIHSGVFFRKNLLRLTG |
| 5782 | YPDPHsPFAVFFRKNLLRLTG |
| 5783 | YPGGRRsSLFFRKNLLRLTG |
| 5784 | YPLsPAKVNQYFFRKNLLRLTG |
| 5785 | YPLsPTKISEYFFRKNLLRLTG |
| 5786 | YPLsPTKISQYFFRKNLLRLTG |
| 5787 | YPRsEDEVEGVMFFRKNLLRLIG |
| 5788 | YPRsFDEVEGFFFRKNLLRLTG |
| 5789 | YPRsFDEVEGLFFRKNLLRLTG |
| 5790 | YPRsFDEVEGMFFRKNLLRLTG |
| 5791 | YPRsFDEVEGVFFRKNLLRLTG |
| 5792 | YPRsFDEVEGVFFFRKNLLRLTG |
| 5793 | YPRsFDEVEGVLFFRKNLLRLTG |
| 5794 | YPRsFDEVEGVMFFRKNLLRLTG |
| 5795 | YPRsFDEVEGVVFFRKNLLRLTG |
| 5796 | YPSFRRsSLFFRKNLLRLTG |
| 5797 | YPSsPRKALFFRKNLLRLTG |
| 5798 | YPSsPRKFFFRKNLLRLTG |
| 5799 | YPSsPRKLFFRKNLLRLTG |
| 5800 | YPSsPRKMFFRKNLLRLTG |
| 5801 | YPSsPRKVFFRKNLLRLTG |
| 5802 | YPYEFsPVKMFFRKNLLRLTG |
| 5803 | YQLsPTKLPSIFFRKNLLRLTG |
| 5804 | YQLsPTKLPSVFFRKNLLRLTG |
| 5805 | YQRPFsPSAYFFRKNLLRLTG |
| 5806 | YQRsFDEVEGFFFRKNLLRLTG |
| 5807 | YQRsFDEVEGLFFRKNLLRLTG |
| 5808 | YQRsFDEVEGMFFRKNLLRLTG |
| 5809 | YQRsFDEVEGVFFRKNLLRLTG |
| 5810 | YQRsFDEVEGVFFFRKNLLRLTG |
| 5811 | YQRsFDEVEGVLFFRKNLLRLTG |
| 5812 | YQRsFDEVEGVMFFRKNLLRLTG |
| 5813 | YQRsFDEVEGVVFFRKNLLRLTG |
| 5814 | YRYsPQSFLFFRKNLLRLTG |
| 5815 | YTAGtPYKVFFRKNLLRLTG |
| 5816 | YYTAGSSsPTHAKSAHVFFRKNLLRLTG |
| 8809 | RLLsAAENFLFFRKNLLRLTG |

Lowercase s, t, and y indicate phosphorylated serine,
phosphorylated threonine, and phosphorylated tyrosine,
respectively.
Lowercase c indicates that the cysteine is present in a
cysteine—cysteine disulfide bond.
Lowercase m indicates oxidized methionine.
(AcS) indicates an N-terminally acetylated serine.
(sLss) indicates that at least one serine residue in the
amino acid sequence. SLSS is phosphorylated.
(sPs) indicates that at least one serine residue in
the amino acid sequence SPS is phosphorylated.

TABLE 5
Amino acid sequences of
exemplary antigenic polypeptides

| SEQ | |
|---|---|
| ID | |
| NO | Amino Acid Sequence |
| 5817 | (AcS)AARESHPHGVKRSAsPDDDLGFFRKNWLRLTW |
| 5818 | AAEsPSFLFFRKNWLRLTW |
| 5819 | AASNFKsPVKTIRFFRKNWLRLTW |
| 5820 | ADLsPEREVFFRKNWLRLTW |
| 5821 | AEDEIGtPRKFFFRKNWLRLTW |
| 5822 | AEDEIGtPRKYFFRKNWLRLTW |
| 5823 | AEEEIGtPRKFFFRKNWLRLTW |
| 5824 | AEEEIGtPRKWFFRKNWLRLTW |
| 5825 | AEEEIGtPRKYFFRKNWLRLTW |
| 5826 | AENARSAsFFFRKNWLRLTW |
| 5827 | AENsPTRQQFFFRKNWLRLTW |
| 5828 | AENsPTRQQWFFRKNWLRLTW |
| 5829 | AENsPTRQQYFFRKNWLRLTW |
| 5830 | AENsSSRELFFRKNWLRLTW |
| 5831 | AEQGsPRVSYFFRKNWLRLTW |
| 5832 | AESsPTAGKKFFFRKNWLRLTW |
| 5833 | AESsPTAGKKLFFRKNWLRLTW |
| 5834 | AESsPTAGKKWFFRKNWLRLTW |
| 5835 | AESsPTAGKKYFFRKNWLRLTW |
| 5836 | AGDsPGSQFFFRKNWLRLTW |
| 5837 | AILsPAFKVFFRKNWLRLTW |
| 5838 | AIMRsPQMVFFRKNWLRLTW |
| 5839 | AIsDLQQLFFRKNWLRLTW |
| 5840 | AKLsETISFFRKNWLRLTW |
| 5841 | ALAAsPHAVFFRKNWLRLTW |
| 5842 | ALDsGASLLHLFFRKNWLRLTW |
| 5843 | ALDsGASLLHVFFRKNWLRLTW |
| 5844 | ALGNtPPFLFFRKNWLRLTW |
| 5845 | ALGsRESLATIFFRKNWLRLTW |
| 5846 | ALGsRESLATVFFRKNWLRLTW |
| 5847 | ALIHQsLGLFFRKNWLRLTW |
| 5848 | ALIHQsLGVFFRKNWLRLTW |
| 5849 | ALLGSKsPDPYRLFFRKNWLRLTW |
| 5850 | ALLGSKsPDPYRVFFRKNWLRLTW |
| 5851 | ALLsLLKRVFFRKNWLRLTW |
| 5852 | ALMGsPQLVFFRKNWLRLTW |
| 5853 | ALMGsPQLVAAFFRKNWLRLTW |
| 5854 | ALRSsPIMRKFFRKNWLRLTW |
| 5855 | ALRSsPIMRYFFRKNWLRLTW |
| 5856 | ALVsPPALHNAFFRKNWLRLTW |
| 5857 | ALVsPPALHNVFFRKNWLRLTW |
| 5858 | ALYsGVHKKFFRKNWLRLTW |
| 5859 | ALYsGVHKYFFRKNWLRLTW |
| 5860 | ALYsPAQPSLFFRKNWLRLTW |
| 5861 | ALYsPAQPSVFFRKNWLRLTW |
| 5862 | ALYtPQAPKFFRKNWLRLTW |
| 5863 | ALYtPQAPYFFRKNWLRLTW |
| 5864 | AMAAsPHAVFFRKNWLRLTW |
| 5865 | AMDsGASLLHLFFRKNWLRLTW |
| 5866 | AMDsGASLLHVFFRKNWLRLTW |
| 5867 | AMGsRESLATIFFRKNWLRLTW |
| 5868 | AMGsRESLATVFFRKNWLRLTW |
| 5869 | AMLGSKsPDPYRLFFRKNWLRLTW |
| 5870 | AMLGSKsPDPYRVFFRKNWLRLTW |
| 5871 | AMPGsPVEVFFRKNWLRLTW |
| 5872 | AMRSsPIMRKFFRKNWLRLTW |
| 5873 | AMVsPPALHNAFFRKNWLRLTW |
| 5874 | AMVsPPALHNVFFRKNWLRLTW |
| 5875 | AMYsGVHKKFFRKNWLRLTW |
| 5876 | APDsPRAFLFFRKNWLRLTW |
| 5877 | APLARASsLFFRKNWLRLTW |
| 5878 | APPAYEKLsFFRKNWLRLTW |
| 5879 | APPAYEKLsAEQFFRKNWLRLTW |
| 5880 | APPAYEKLsAEQSPPFFRKNWLRLTW |
| 5881 | APPAYEKLsAEQSPPPFFRKNWLRLTW |
| 5882 | APPAYEKLsAEQSPPPYFFRKNWLRLTW |
| 5883 | APPPLVPAPRPSsPPRGPGPARADRFFRKNWLRLTW |
| 5884 | APRAPsASPLALFFRKNWLRLTW |
| 5885 | APRDRRAVsFFFRKNWLRLTW |
| 5886 | APRKGsFSALFFRKNWLRLTW |
| 5887 | APRKGsFSALFFFRKNWLRLTW |
| 5888 | APRKGsFSALLFFRKNWLRLTW |
| 5889 | APRKGsFSALMFFRKNWLRLTW |
| 5890 | APRKGsFSALVFFRKNWLRLTW |
| 5891 | APRNGsGVALFFRKNWLRLTW |
| 5892 | APRRYsSSFFFRKNWLRLTW |
| 5893 | APRRYsSSLFFRKNWLRLTW |
| 5894 | APRRYsSSMFFRKNWLRLTW |
| 5895 | APRRYsSSVFFRKNWLRLTW |
| 5896 | APRsPPPSRFFFRKNWLRLTW |
| 5897 | APRsPPPSRLFFRKNWLRLTW |
| 5898 | APRsPPPSRMFFRKNWLRLTW |
| 5899 | APRsPPPSRPFFRKNWLRLTW |
| 5900 | APRsPPPSRVFFRKNWLRLTW |
| 5901 | APSLFHLNtLFFRKNWLRLTW |
| 5902 | APSSARAsPLLFFRKNWLRLTW |
| 5903 | APSTYAHLsPAKFFRKNWLRLTW |
| 5904 | APSTYAHLsPAKTPPPPFFRKNWLRLTW |
| 5905 | APSVRsLSLFFRKNWLRLTW |
| 5906 | APSVRSLsLFFRKNWLRLTW |
| 5907 | ARFsPDDKYSFFFRKNWLRLTW |
| 5908 | ARFsPDDKYSKFFRKNWLRLTW |
| 5909 | ARFsPDDKYSLFFRKNWLRLTW |
| 5910 | ARFsPDDKYSMFFRKNWLRLTW |
| 5911 | ARFsPDDKYSRFFRKNWLRLTW |
| 5912 | ARFsPDDKYSYFFRKNWLRLTW |
| 5913 | ASDEIGtPRKFFFRKNWLRLTW |
| 5914 | ASDEIGtPRKYFFRKNWLRLTW |
| 5915 | ASEEIGtPRKFFFRKNWLRLTW |
| 5916 | ASEEIGtPRKYFFRKNWLRLTW |
| 5917 | AsISRLsGEQVDGKGFFRKNWLRLTW |
| 5918 | AsISRLSGEQVDGKGFFRKNWLRLTW |
| 5919 | ASISRLsGEQVDGKGFFRKNWLRLTW |
| 5920 | AsIsRLSGEQVDGKGQFFRKNWLRLTW |
| 5921 | AsISRLSGEQVDKGKGFFRKNWLRLTW |
| 5922 | ASKAsPTLDFTERFFRKNWLRLTW |
| 5923 | ASKMTQPQSKSAFPLSRKNKGsGsLDGFFRKNWLRLTW |
| 5924 | AsLGFVFFFRKNWLRLTW |
| 5925 | AsPTIEAQGTSPAHDNFFRKNWLRLTW |
| 5926 | AsPTIEAQGTSPAHDNIFFRKNWLRLTW |
| 5927 | AsPTIEAQGTSPAHDNIAFFRKNWLRLTW |
| 5928 | AtAGPRLGFFFRKNWLRLTW |
| 5929 | AtAGPRLGWFFRKNWLRLTW |
| 5930 | AtAGPRLGYFFRKNWLRLTW |
| 5931 | ATDEIGtPRKFFFRKNWLRLTW |
| 5932 | ATDEIGtPRKYFFRKNWLRLTW |
| 5933 | ATEEIGtPRKFFFRKNWLRLTW |
| 5934 | ATEEIGtPRKYFFRKNWLRLTW |
| 5935 | ATWsGSEFEVFFRKNWLRLTW |
| 5936 | ATYtPQAPKFFRKNWLRLTW |
| 5937 | ATYtPQAPKYFFRKNWLRLTW |
| 5938 | AVIHQsLGLFFRKNWLRLTW |
| 5939 | AVIHQsLGVFFRKNWLRLTW |
| 5940 | AVRPTRLsLFFRKNWLRLTW |
| 5941 | AVVsPPALHNAFFRKNWLRLTW |
| 5942 | AVVsPPALHNVFFRKNWLRLTW |
| 5943 | AYEKLsAEQSPPFFRKNWLRLTW |
| 5944 | DAKKsPLALFFRKNWLRLTW |
| 5945 | DDDWTHLsSKEVDPFFRKNWLRLTW |
| 5946 | DDDWTHLsSKEVDPSFFRKNWLRLTW |
| 5947 | DDDWTHLsSKEVDPSTFFRKNWLRLTW |
| 5948 | DDDWTHLsSKEVDPSTGFFRKNWLRLTW |
| 5949 | DDWTHLsSKEVDPSFFRKNWLRLTW |
| 5950 | DEFERIKtFFFRKNWLRLTW |
| 5951 | DEFERIKtWFFRKNWLRLTW |
| 5952 | DEFERIKtYFFRKNWLRLTW |
| 5953 | DEISHRAsFFFRKNWLRLTW |
| 5954 | DEISHRAsWFFRKNWLRLTW |
| 5955 | DEISHRAsYFFRKNWLRLTW |
| 5956 | DERLRINsFFFRKNWLRLTW |
| 5957 | DERLRINsLFFRKNWLRLTW |
| 5958 | DERLRINsWFFRKNWLRLTW |
| 5959 | DERLRINsYFFRKNWLRLTW |
| 5960 | DKLsVIAEDSESGKQFFRKNWLRLTW |
| 5961 | DKLsVIAEDSESGKQNFFRKNWLRLTW |
| 5962 | DKLsVIAEDSESGKQNPFFRKNWLRLTW |
| 5963 | DKLsVIAEDSESGKQNPGFFRKNWLRLTW |
| 5964 | DKLsVIAEDSESGKQNPGDSFFRKNWLRLTW |
| 5965 | DLKRRsmSIFFRKNWLRLTW |
| 5966 | DLKRRsMSIFFRKNWLRLTW |
| 5967 | DLKSSKAsLFFRKNWLRLTW |
| 5968 | DLRtVEKELFFRKNWLRLTW |
| 5969 | DLsEEKFLFFRKNWLRLTW |
| 5970 | DLsEEKFVFFRKNWLRLTW |
| 5971 | DLVPLsPLKKFFRKNWLRLTW |
| 5972 | DLWKItKVMDFFRKNWLRLTW |
| 5973 | DMVPLsPLKKFFRKNWLRLTW |
| 5974 | DPTRRFFKVtPPPGSGPQFFRKNWLRLTW |
| 5975 | DQFERIKtLFFRKNWLRLTW |
| 5976 | DQISHRAsLFFRKNWLRLTW |
| 5977 | DSDPLsPLKYFFRKNWLRLTW |
| 5978 | DSEPLsPLKYFFRKNWLRLTW |
| 5979 | DSsEEKFLFFRKNWLRLTW |
| 5980 | DSsEEKFVFFRKNWLRLTW |
| 5981 | DSVPLsPLKYFFRKNWLRLTW |
| 5982 | DTDPLsPLKYFFRKNWLRLTW |
| 5983 | DTEPLsPLKYFFRKNWLRLTW |
| 5984 | DTVPLsPLKYFFRKNWLRLTW |
| 5985 | DWTHLsSKEVDPSFFRKNWLRLTW |
| 5986 | DWTHLsSKEVDPSTGFFRKNWLRLTW |
| 5987 | EEGsPTMVEKGLEPGVFTLFFRKNWLRLTW |
| 5988 | EELsPTAKFFFRKNWLRLTW |
| 5989 | EELsPTKAFFFRKNWLRLTW |
| 5990 | EEMPENALPsDEDDKDPNDPYRALFFRKNWLRLTW |
| 5991 | EERRsPPAPFFRKNWLRLTW |
| 5992 | EEsSDDGKKFFFRKNWLRLTW |
| 5993 | EESsDDGKKFFFRKNWLRLTW |
| 5994 | EEsSDDGKKWFFRKNWLRLTW |
| 5995 | EESsDDGKKWFFRKNWLRLTW |
| 5996 | EEsSDDGKKYFFRKNWLRLTW |
| 5997 | EESsDDGKKYFFRKNWLRLTW |
| 5998 | EGEEPTVYsDEEEPKDESARKNDFFRKNWLRLTW |
| 5999 | EGsPTMVEKGLEPGVFTLFFRKNWLRLTW |
| 6000 | ELFSsPPAVFFRKNWLRLTW |
| 6001 | ELKKsPTSLKFFRKNWLRLTW |
| 6002 | ELKKsPTSLYFFRKNWLRLTW |
| 6003 | ELLMPHRIsSHFFFRKNWLRLTW |
| 6004 | ELLMPHRIsSHFLFFRKNWLRLTW |
| 6005 | ELRISGsVQLFFRKNWLRLTW |
| 6006 | EMKKsPTSLKFFRKNWLRLTW |
| 6007 | EPAsPAAsISRLsGEQVDGKGFFRKNWLRLTW |
| 6008 | EPAsPAAsISRLSGEQVDGKGFFRKNWLRLTW |
| 6009 | EPKRRsARFFFRKNWLRLTW |
| 6010 | EPKRRsARLFFRKNWLRLTW |
| 6011 | EPKRRsARMFFRKNWLRLTW |
| 6012 | EPKRRsARVFFRKNWLRLTW |
| 6013 | EPRsPSHSFFFRKNWLRLTW |
| 6014 | EPRsPSHSLFFRKNWLRLTW |
| 6015 | EPRsPSHSMFFRKNWLRLTW |
| 6016 | EPRsPSHSVFFRKNWLRLTW |
| 6017 | ERsPLLSQETAGQKPFFRKNWLRLTW |
| 6018 | ERsPLLSQETAGQKPLFFRKNWLRLTW |
| 6019 | ESDsLPRYFFRKNWLRLTW |
| 6020 | ESEsLPRYFFRKNWLRLTW |
| 6021 | ESsVRSQEDQLSRFFRKNWLRLTW |
| 6022 | ESsVRSQEDQLSRRFFRKNWLRLTW |
| 6023 | ETDsLPRYFFRKNWLRLTW |
| 6024 | ETEsLPRYFFRKNWLRLTW |
| 6025 | FDKHTLGDsDNESFFRKNWLRLTW |
| 6026 | FEDDDsNEKLFFRKNWLRLTW |
| 6027 | FIEsPSKLFFRKNWLRLTW |
| 6028 | FIEsPSKYFFRKNWLRLTW |
| 6029 | FIGsPTTPAGLFFRKNWLRLTW |
| 6030 | FKMPQEKsPGYSFFRKNWLRLTW |
| 6031 | FKsPVKTIRFFRKNWLRLTW |
| 6032 | FKtQPVTFFFRKNWLRLTW |
| 6033 | FLDNsFEKVFFRKNWLRLTW |
| 6034 | FLDRPPtPLFIFFRKNWLRLTW |
| 6035 | FLDsLRDLIFFRKNWLRLTW |
| 6036 | FLDtPIAKVFFRKNWLRLTW |
| 6037 | FLFDKPVsPLLLFFRKNWLRLTW |
| 6038 | FLGVRPKsAFFRKNWLRLTW |
| 6039 | FLIIRtVLQLFFRKNWLRLTW |
| 6040 | FLITGGGKGsGFSLFFRKNWLRLTW |
| 6041 | FLLsQNFDDEFFRKNWLRLTW |
| 6042 | FLYsGKETKFFRKNWLRLTW |
| 6043 | FLYsGKETYFFRKNWLRLTW |
| 6044 | FPHsLLSVFFFRKNWLRLTW |
| 6045 | FPHsLLSVIFFRKNWLRLTW |
| 6046 | FPHsLLSVLFFRKNWLRLTW |
| 6047 | FPHsLLSVMFFRKNWLRLTW |
| 6048 | FPHsLLSVVFFRKNWLRLTW |
| 6049 | FPIsPVRFFFRKNWLRLTW |
| 6050 | FPIsPVRLFFRKNWLRLTW |
| 6051 | FPIsPVRMFFRKNWLRLTW |
| 6052 | FPIsPVRVFFRKNWLRLTW |
| 6053 | FPLDsPKTLVLFFRKNWLRLTW |
| 6054 | FPRRHsVTLFFRKNWLRLTW |
| 6055 | FPRsPTKSSFFFRKNWLRLTW |
| 6056 | FPRsPTKSSLFFRKNWLRLTW |
| 6057 | FPRsPTKSSLDFFFRKNWLRLTW |
| 6058 | FPRsPTKSSLDLFFRKNWLRLTW |
| 6059 | FPRsPTKSSLDMFFRKNWLRLTW |
| 6060 | FPRsPTKSSLDVFFRKNWLRLTW |
| 6061 | FPRsPTKSSMFFRKNWLRLTW |
| 6062 | FPRsPTKSSVFFRKNWLRLTW |
| 6063 | FRFsGRTEYFFRKNWLRLTW |
| 6064 | FRGRYRsPYFFRKNWLRLTW |
| 6065 | FRKsMVEHYFFRKNWLRLTW |
| 6066 | FRRsPIKSSLDYFFRKNWLRLTW |
| 6067 | FRRsPTKSSFFFRKNWLRLTW |
| 6068 | FRRsPTKSSLFFRKNWLRLTW |
| 6069 | FRRsPTKSSLDFFRKNWLRLTW |
| 6070 | FRRsPTKSSLDFFFRKNWLRLTW |
| 6071 | FRRsPTKSSLDLFFRKNWLRLTW |
| 6072 | FRRsPTKSSLDMFFRKNWLRLTW |
| 6073 | FRRsPTKSSLDVFFRKNWLRLTW |
| 6074 | FRRsPTKSSLDYFFRKNWLRLTW |
| 6075 | FRRsPTKSSMFFRKNWLRLTW |
| 6076 | FRRsPTKSSVFFRKNWLRLTW |
| 6077 | FRsPTKSSLDFFFRKNWLRLTW |
| 6078 | FRsPTKSSLDLFFRKNWLRLTW |
| 6079 | FRsPTKSSLDMFFRKNWLRLTW |
| 6080 | FRsPTKSSLDVFFRKNWLRLTW |
| 6081 | FRYsGKTEFFFRKNWLRLTW |
| 6082 | FRYsGKTEKFFRKNWLRLTW |
| 6083 | FRYsGKTELFFRKNWLRLTW |
| 6084 | FRYsGKTEMFFRKNWLRLTW |
| 6085 | FRYsGKTERFFRKNWLRLTW |
| 6086 | FRYsGKTEYFFRKNWLRLTW |
| 6087 | FSDsHEGFSYFFRKNWLRLTW |
| 6088 | FSEsHEGFSYFFRKNWLRLTW |
| 6089 | FSEsPSKLFFRKNWLRLTW |
| 6090 | FSEsPSKYFFRKNWLRLTW |
| 6091 | FSIsPVRFFFRKNWLRLTW |
| 6092 | FSIsPVRLFFRKNWLRLTW |
| 6093 | FSIsPVRMFFRKNWLRLTW |
| 6094 | FSIsPVRVFFRKNWLRLTW |
| 6095 | FSsSHEGFSYFFRKNWLRLTW |
| 6096 | FSSsHEGFSYFFRKNWLRLTW |
| 6097 | FTDsHEGFSYFFRKNWLRLTW |
| 6098 | FTEsHEGFSYFFRKNWLRLTW |
| 6099 | FTEsPSKLFFRKNWLRLTW |
| 6100 | FTEsPSKYFFRKNWLRLTW |
| 6101 | FTKsPYQEFFFRKNWLRLTW |
| 6102 | FTsSHEGFSYFFRKNWLRLTW |
| 6103 | FVSKVMIGsPKKVFFRKNWLRLTW |
| 6104 | GALsPSLLHSLFFRKNWLRLTW |
| 6105 | GAQPGRHsFFFRKNWLRLTW |
| 6106 | GAQPGRHsLFFRKNWLRLTW |
| 6107 | GAQPGRHsVFFRKNWLRLTW |
| 6108 | GDDDWTHLsSKEVDFFRKNWLRLTW |
| 6109 | GDDDWTHLsSKEVDPFFRKNWLRLTW |
| 6110 | GDDDWTHLsSKEVDPSFFRKNWLRLTW |
| 6111 | GDDDWTHLsSKEVDPSTFFRKNWLRLTW |
| 6112 | GDDDWTHLsSKEVDPSTGFFRKNWLRLTW |
| 6113 | GEAsPSHIIFFRKNWLRLTW |
| 6114 | GEEsSDDGKKFFFRKNWLRLTW |
| 6115 | GEEsSDDGKKWFFRKNWLRLTW |
| 6116 | GEEsSDDGKKYFFRKNWLRLTW |
| 6117 | GEEsSDIDGKKFFFRKNWLRLTW |
| 6118 | GEIsPQREVFFRKNWLRLTW |
| 6119 | GERsPLLSQETAGQKPFFRKNWLRLTW |
| 6120 | GERsPLLSQETAGQKPLFFRKNWLRLTW |
| 6121 | GETsPRTKIFFRKNWLRLTW |
| 6122 | GGDDDWTHLsSKEVDPSFFRKNWLRLTW |
| 6123 | GGDDDWTHLsSKEVDPSTGFFRKNWLRLTW |
| 6124 | GGSFGGRSSGsPFFRKNWLRLTW |
| 6125 | GGSFGGRSSGsVFFRKNWLRLTW |
| 6126 | GIDsPSSSVFFRKNWLRLTW |
| 6127 | GIMsPLAKKFFRKNWLRLTW |
| 6128 | GLAPtPPSMFFRKNWLRLTW |
| 6129 | GLDsGFHSVFFRKNWLRLTW |
| 6130 | GLDsLDQVEIFFRKNWLRLTW |
| 6131 | GLGELLRsLFFRKNWLRLTW |
| 6132 | GLIRSRsFIFKFFRKNWLRLTW |
| 6133 | GLIRSRsFIFYFFRKNWLRLTW |
| 6134 | GLIsPELRHLFFRKNWLRLTW |
| 6135 | GLIsPNVQLFFRKNWLRLTW |
| 6136 | GLIsPVWGAFFRKNWLRLTW |
| 6137 | GLItPGGFSSVFFRKNWLRLTW |
| 6138 | GLLDsPTSIFFRKNWLRLTW |
| 6139 | GLLGsPARLFFRKNWLRLTW |
| 6140 | GLLGsPVRAFFRKNWLRLTW |
| 6141 | GLLGsPVRVFFRKNWLRLTW |
| 6142 | GLLsPARLYAIFFRKNWLRLTW |
| 6143 | GLLsPARLYAVFFRKNWLRLTW |
| 6144 | GLLsPRFVDVFFRKNWLRLTW |
| 6145 | GLLsPRHSLFFRKNWLRLTW |
| 6146 | GLSFGGRSSGsPFFRKNWLRLTW |
| 6147 | GLSFGGRSSGsVFFRKNWLRLTW |
| 6148 | GMLGsPVRVFFRKNWLRLTW |
| 6149 | GMLsPARLYAIFFRKNWLRLTW |
| 6150 | GMLsPARLYAVFFRKNWLRLTW |
| 6151 | GMLsPGKSIEVFFRKNWLRLTW |
| 6152 | GPKPLFRRMsSFFRKNWLRLTW |
| 6153 | GPKPLFRRMsSLFFRKNWLRLTW |
| 6154 | GPKPLFRRMsSLVFFRKNWLRLTW |
| 6155 | GPKPLFRRMsSLVGFFRKNWLRLTW |
| 6156 | GPKPLFRRMsSLVGPFFRKNWLRLTW |
| 6157 | GPKPLFRRMsSLVGPTFFRKNWLRLTW |
| 6158 | GPKPLFRRMsSLVGPTQFFRKNWLRLTW |
| 6159 | GPKPLFRRMsSLVGPTQSFFRKNWLRLTW |
| 6160 | GPPYQRRGsLFFRKNWLRLTW |
| 6161 | GPQPGRHsFFFRKNWLRLTW |
| 6162 | GPQPGRHsLFFRKNWLRLTW |
| 6163 | GPQPGRHsVFFRKNWLRLTW |
| 6164 | GPRPGsPSAFFFRKNWLRLTW |
| 6165 | GPRPGsPSALFFRKNWLRLTW |
| 6166 | GPRPGsPSAMFFRKNWLRLTW |
| 6167 | GPRPGsPSAVFFRKNWLRLTW |
| 6168 | GPRSAsLLFFRKNWLRLTW |
| 6169 | GPRsASLLSFFFRKNWLRLTW |
| 6170 | GPRSAsLLsFFFRKNWLRLTW |
| 6171 | GPRSASLLsFFFRKNWLRLTW |
| 6172 | GPRsAsLLSLFFRKNWLRLTW |
| 6173 | GPRsASLLSLFFRKNWLRLTW |
| 6174 | GPRSAsLLsLFFRKNWLRLTW |
| 6175 | GPRSAsLLSLFFRKNWLRLTW |
| 6176 | GPRSASLLsLFFRKNWLRLTW |
| 6177 | GPRsASLLSMFFRKNWLRLTW |
| 6178 | GPRSAsLLsMFFRKNWLRLTW |
| 6179 | GPRSASLLSMFFRKNWLRLTW |
| 6180 | GPRsASLLSVFFRKNWLRLTW |
| 6181 | GPRSAsLLsVFFRKNWLRLTW |
| 6182 | GPRSASLLSVFFRKNWLRLTW |
| 6183 | GPRsPKAPPFFRKNWLRLTW |
| 6184 | GPRsPPVTLFFRKNWLRLTW |
| 6185 | GQLsPGVQFFFRKNWLRLTW |
| 6186 | GRKsPPPSFFFRKNWLRLTW |
| 6187 | GRKsPPPSKFFRKNWLRLTW |
| 6188 | GRKsPPPSLFFRKNWLRLTW |
| 6189 | GRKsPPPSMFFRKNWLRLTW |
| 6190 | GRKsPPPSRFFRKNWLRLTW |
| 6191 | GRKsPPPSYFFRKNWLRLTW |
| 6192 | GRLGsPHRFFFRKNWLRLTW |
| 6193 | GRLGsPHRKFFRKNWLRLTW |
| 6194 | GRLGsPHRLFFRKNWLRLTW |
| 6195 | GRLGsPHRMFFRKNWLRLTW |
| 6196 | GRLGsPHRRFFRKNWLRLTW |
| 6197 | GRLGsPHRYFFRKNWLRLTW |
| 6198 | GRLsPAYSLFFRKNWLRLTW |
| 6199 | GRLsPKASQVFFFRKNWLRLTW |
| 6200 | GRLsPKASQVKFFRKNWLRLTW |
| 6201 | GRLsPKASQVLFFRKNWLRLTW |
| 6202 | GRLsPKASQVMFFRKNWLRLTW |
| 6203 | GRLsPKASQVRFFRKNWLRLTW |
| 6204 | GRLsPKASQVYFFRKNWLRLTW |
| 6205 | GRLsPVPVPFFFRKNWLRLTW |
| 6206 | GRLsPVPVPKFFRKNWLRLTW |
| 6207 | GRLsPVPVPLFFRKNWLRLTW |
| 6208 | GRLsPVPVPMFFRKNWLRLTW |
| 6209 | GRLsPVPVPRFFRKNWLRLTW |
| 6210 | GRLsPVPVPYFFRKNWLRLTW |
| 6211 | GRQsPSFKLFFRKNWLRLTW |
| 6212 | GRsSPPPGYFFRKNWLRLTW |
| 6213 | GRSsTASLVKFFFRKNWLRLTW |
| 6214 | GRSsTASLVKKFFRKNWLRLTW |
| 6215 | GRSsTASLVKKKFFRKNWLRLTW |
| 6216 | GRSsTASLVKLFFRKNWLRLTW |
| 6217 | GRSSTASLVKMFFRKNWLRLTW |
| 6218 | GRSSTASLVKRFFRKNWLRLTW |
| 6219 | GRSSTASLVKYFFRKNWLRLTW |
| 6220 | GRtGLPDLFFRKNWLRLTW |
| 6221 | GSALGGGGAGLSGRASGGAQsPLRYLHVFFRKNWLRLTW |
| 6222 | GSDsSDDGKKYFFRKNWLRLTW |
| 6223 | GSEsSDDGKKYFFRKNWLRLTW |
| 6224 | GsPHYFSPFFFRKNWLRLTW |
| 6225 | GsPHYFSPFRPYFFRKNWLRLTW |
| 6226 | GsPTMVEKGLEPGVFTLFFRKNWLRLTW |
| 6227 | GsQLAVMMYLFFRKNWLRLTW |
| 6228 | GTDsSDDGKKYFFRKNWLRLTW |
| 6229 | GTEsSDDGKKYFFRKNWLRLTW |
| 6230 | GTIRSRsFIFKFFRKNWLRLTW |
| 6231 | GTIRSRsFIFYFFRKNWLRLTW |
| 6232 | GtLPKYFFRKNWLRLTW |
| 6233 | GtLRRSDSQQAVKFFRKNWLRLTW |
| 6234 | GtLRRSDSQQAVKSFFRKNWLRLTW |
| 6235 | GtLRRSDSQQAVKSPPFFRKNWLRLTW |
| 6236 | GVAsPTITVFFRKNWLRLTW |
| 6237 | GVVsPTFELFFRKNWLRLTW |
| 6238 | HEKKAYsFFFRKNWLRLTW |
| 6239 | HKGEIRGASTPFQFRAsSPFFRKNWLRLTW |
| 6240 | HLHsPQHKLFFRKNWLRLTW |
| 6241 | HPKRSVsLFFRKNWLRLTW |
| 6242 | HPRsPNVLFFRKNWLRLTW |
| 6243 | HPRsPNVLSFFFRKNWLRLTW |
| 6244 | HPRsPNVLSLFFRKNWLRLTW |
| 6245 | HPRsPNVLSMFFRKNWLRLTW |
| 6246 | HPRsPNVLSVFFRKNWLRLTW |
| 6247 | HPRsPTPTFFFRKNWLRLTW |
| 6248 | HPRSPtPTFFFRKNWLRLTW |
| 6249 | HPRsPTPTLFFRKNWLRLTW |
| 6250 | HPRSPtPTLFFRKNWLRLTW |
| 6251 | HPRsPTPTMFFRKNWLRLTW |
| 6252 | HPRSPtPTMFFRKNWLRLTW |
| 6253 | HPRSPtPTVFFRKNWLRLTW |
| 6254 | HPsSPTPTVFFRKNWLRLTW |
| 6255 | HRLsPVKGEFFFRKNWLRLTW |
| 6256 | HRLsPVKGEKFFRKNWLRLTW |
| 6257 | HRLsPVKGERFFRKNWLRLTW |
| 6258 | HRLsPVKGEYFFRKNWLRLTW |
| 6259 | HRNsMKVFLFFRKNWLRLTW |
| 6260 | HRNsNPVIAEFFFRKNWLRLTW |
| 6261 | HRNsNPVIAEKFFRKNWLRLTW |
| 6262 | HRNsNPVIAELFFRKNWLRLTW |
| 6263 | HRNsNPVIAERFFRKNWLRLTW |
| 6264 | HRNsNPVIAEYFFRKNWLRLTW |
| 6265 | HRYsTPHAFFFRKNWLRLTW |
| 6266 | HTAsPTGMMKFFRKNWLRLTW |
| 6267 | HVYtPSTTKFFRKNWLRLTW |
| 6268 | IEKIyIMKADTVIVGFFRKNWLRLTW |
| 6269 | IIEtPHKEIFFRKNWLRLTW |
| 6270 | IIEtPHKEYFFRKNWLRLTW |
| 6271 | IISsPLKGYFFRKNWLRLTW |
| 6272 | IISsPLTGKFFRKNWLRLTW |
| 6273 | ILDRtPEKLFFRKNWLRLTW |
| 6274 | ILDRtPEKVFFRKNWLRLTW |
| 6275 | ILDsGIYRIFFRKNWLRLTW |
| 6276 | ILDsGIYRVFFRKNWLRLTW |
| 6277 | ILKPRRsLFFRKNWLRLTW |
| 6278 | ILKsPEIQRAFFRKNWLRLTW |
| 6279 | ILKsPEIQRVFFRKNWLRLTW |
| 6280 | ILQtPQFQMFFRKNWLRLTW |
| 6281 | ILQVsIPSLFFRKNWLRLTW |
| 6282 | IMDRtPEKLFFRKNWLRLTW |
| 6283 | IMDRtPEKVFFRKNWLRLTW |
| 6284 | IMDsGIYRIFFRKNWLRLTW |
| 6285 | IMDsGIYRVFFRKNWLRLTW |
| 6286 | IMKsPEIQRAFFRKNWLRLTW |
| 6287 | IMKsPEIQRVFFRKNWLRLTW |
| 6288 | INKERRSsLFFRKNWLRLTW |
| 6289 | IPVgSSHNSLFFRKNWLRLTW |
| 6290 | IQFsPPFPGAFFRKNWLRLTW |
| 6291 | ISDGtLKYFFRKNWLRLTW |
| 6292 | ISDGtPLKYFFRKNWLRLTW |
| 6293 | ISDSAHtDYFFRKNWLRLTW |
| 6294 | ISDsMHSLYFFRKNWLRLTW |
| 6295 | ISDtPHKEIFFRKNWLRLTW |
| 6296 | ISDtPHKEYFFRKNWLRLTW |
| 6297 | ISEGtLKYFFRKNWLRLTW |
| 6298 | ISEGtPLKYFFRKNWLRLTW |
| 6299 | ISESAHtDYFFRKNWLRLTW |
| 6300 | ISEsMHSLYFFRKNWLRLTW |
| 6301 | ISEtPHKEIFFRKNWLRLTW |
| 6302 | ISEtPHKEYFFRKNWLRLTW |
| 6303 | ISFSAHtDYFFRKNWLRLTW |
| 6304 | ISSsMHSLYFFRKNWLRLTW |
| 6305 | IStDRDPLFFRKNWLRLTW |
| 6306 | IStDRDPYFFRKNWLRLTW |
| 6307 | ITDGtLKYFFRKNWLRLTW |
| 6308 | ITDGtPLKYFFRKNWLRLTW |
| 6309 | ITDSAHtDYFFRKNWLRLTW |
| 6310 | ITDsMHSLYFFRKNWLRLTW |
| 6311 | ITDtPHKEIFFRKNWLRLTW |
| 6312 | ITDtPHKEYFFRKNWLRLTW |
| 6313 | ITEGtLKYFFRKNWLRLTW |
| 6314 | ITEGtPLKYFFRKNWLRLTW |
| 6315 | ITESAHtDYFFRKNWLRLTW |
| 6316 | ITEsMHSLYFFRKNWLRLTW |
| 6317 | ITEtPHKEIFFRKNWLRLTW |
| 6318 | ITEtPHKEYFFRKNWLRLTW |
| 6319 | ITQGtLKYFFRKNWLRLTW |
| 6320 | ITQGtPLKKFFRKNWLRLTW |
| 6321 | ITQGtPLKYFFRKNWLRLTW |
| 6322 | ITtDRDPLFFRKNWLRLTW |
| 6323 | ITtDRDPYFFRKNWLRLTW |
| 6324 | IVLsDSEVIQLFFRKNWLRLTW |
| 6325 | IVRyHQLFFRKNWLRLTW |
| 6326 | IVtDRDPLFFRKNWLRLTW |
| 6327 | IVtDRDPYFFRKNWLRLTW |
| 6328 | IYQyIQSRFFFRKNWLRLTW |
| 6329 | KAFsPVRFFRKNWLRLTW |
| 6330 | KAFsPVRSVFFRKNWLRLTW |
| 6331 | KAKsPAPGLFFRKNWLRLTW |
| 6332 | KAKsPAPGVFFRKNWLRLTW |
| 6333 | KARsPGRAFFFRKNWLRLTW |
| 6334 | KARsPGRALFFRKNWLRLTW |
| 6335 | KARsPGRAMFFRKNWLRLTW |
| 6336 | KARsPGRAVFFRKNWLRLTW |
| 6337 | KASPKRLsLFFRKNWLRLTW |
| 6338 | KAVsLFLcYFFRKNWLRLTW |
| 6339 | KAVsLFLCYFFRKNWLRLTW |
| 6340 | KEGEEPTVYsDEEEPKDESARKNDFFRKNWLRLTW |
| 6341 | KEKsPFRETFFRKNWLRLTW |
| 6342 | KELARQIsFFFRKNWLRLTW |
| 6343 | KEMsPTRQFFFRKNWLRLTW |
| 6344 | KEmsPTRQLFFRKNWLRLTW |
| 6345 | KEMSPTRQLFFRKNWLRLTW |
| 6346 | KEMsPTRQWFFRKNWLRLTW |
| 6347 | KEMsPTRQYFFRKNWLRLTW |
| 6348 | KESsPLSSRKIFFRKNWLRLTW |
| 6349 | KFRPPPLsLFFRKNWLRLTW |
| 6350 | KGIsSSSLKEKFFRKNWLRLTW |
| 6351 | KIAsEIAQLFFRKNWLRLTW |
| 6352 | KIDIVsSQKVFFRKNWLRLTW |
| 6353 | KIDsPTKVKKFFRKNWLRLTW |
| 6354 | KIEKIyIMKADTVIVGFFRKNWLRLTW |
| 6355 | KIEsLENLYLFFRKNWLRLTW |
| 6356 | KIFsGVFVKFFRKNWLRLTW |
| 6357 | KIFsGVFVKVFFRKNWLRLTW |
| 6358 | KIFsKQQGKFFRKNWLRLTW |
| 6359 | KIFsKQQGYFFRKNWLRLTW |
| 6360 | KIGsIIFQVFFRKNWLRLTW |
| 6361 | KIKsFEWFFFRKNWLRLTW |
| 6362 | KIRSsPREAKFFRKNWLRLTW |
| 6363 | KIRSsPREAYFFRKNWLRLTW |
| 6364 | KIRTsPTFRFFRKNWLRLTW |
| 6365 | KIRTsPTFYFFRKNWLRLTW |
| 6366 | KLAsLEREASVFFRKNWLRLTW |
| 6367 | KLAsLLHQVFFRKNWLRLTW |
| 6368 | KLAsPEKLAGLFFRKNWLRLTW |
| 6369 | KLAsPELERLFFRKNWLRLTW |
| 6370 | KLAsPELERVFFRKNWLRLTW |
| 6371 | KLDIVsSQKVFFRKNWLRLTW |
| 6372 | KLDsFLDMQVFFRKNWLRLTW |
| 6373 | KLDsPRVTVFFRKNWLRLTW |
| 6374 | KLDsPTKVKKFFRKNWLRLTW |
| 6375 | KLDsPTKVKYFFRKNWLRLTW |
| 6376 | KLFPDtPLALFFRKNWLRLTW |
| 6377 | KLFPDtPLAVFFRKNWLRLTW |
| 6378 | KLFsGTVRKFFRKNWLRLTW |
| 6379 | KLFsGVFVKVFFRKNWLRLTW |
| 6380 | KLFsKQQGKFFRKNWLRLTW |
| 6381 | KLFsKQQGYFFRKNWLRLTW |
| 6382 | KLFsPAHKKFFRKNWLRLTW |
| 6383 | KLFsPAHKYFFRKNWLRLTW |
| 6384 | KLFsPSKEAELFFRKNWLRLTW |
| 6385 | KLFsPSKEAEVFFRKNWLRLTW |
| 6386 | KLHGsLARAGKFFRKNWLRLTW |
| 6387 | KLHGsLARAGYFFRKNWLRLTW |
| 6388 | KLIDIVsSQKVFFRKNWLRLTW |
| 6389 | KLIDRTEsLFFRKNWLRLTW |
| 6390 | KLIDVsSQKVFFRKNWLRLTW |
| 6391 | KLIsSSSLKEKFFRKNWLRLTW |
| 6392 | KLIsSSSLKEYFFRKNWLRLTW |
| 6393 | KLKDRLPsIFFRKNWLRLTW |
| 6394 | KLKsNPDFLKFFRKNWLRLTW |
| 6395 | KLKsNPDFLKKFFRKNWLRLTW |
| 6396 | KLKsNPDFLKYFFRKNWLRLTW |
| 6397 | KLKsPAPGLFFRKNWLRLTW |
| 6398 | KLKsPAPGVFFRKNWLRLTW |
| 6399 | KLKsQEIFLFFRKNWLRLTW |
| 6400 | KLKSsPLIEKKFFRKNWLRLTW |
| 6401 | KLKSsPLIEKYFFRKNWLRLTW |
| 6402 | KLKtPLVAKFFRKNWLRLTW |
| 6403 | KLKtPLVARFFRKNWLRLTW |
| 6404 | KLLDFGSLsNLQVFFRKNWLRLTW |
| 6405 | KLLQFYPsLFFRKNWLRLTW |
| 6406 | KLLQFYPsVFFRKNWLRLTW |
| 6407 | KLLsPSDEKLFFRKNWLRLTW |
| 6408 | KLLsPSNEKLFFRKNWLRLTW |
| 6409 | KLLsPSNEKVFFRKNWLRLTW |
| 6410 | KLLSSAQRtLFFRKNWLRLTW |
| 6411 | KLLSSAQRtVFFRKNWLRLTW |
| 6412 | KLLsTEEMELFFRKNWLRLTW |
| 6413 | KLLsTEEMEVFFRKNWLRLTW |
| 6414 | KLLsVERIKFFRKNWLRLTW |
| 6415 | KLLtPIKEKFFRKNWLRLTW |
| 6416 | KLLtPIKEYFFRKNWLRLTW |
| 6417 | KLMAPDIsLFFRKNWLRLTW |
| 6418 | KLMAPDIsVFFRKNWLRLTW |
| 6419 | KLMIDRTEsVFFRKNWLRLTW |
| 6420 | KLMsDVEDVFFRKNWLRLTW |
| 6421 | KLMsPKADVFFRKNWLRLTW |
| 6422 | KLMsPKADVKLFFRKNWLRLTW |
| 6423 | KLMsPKADVKVFFRKNWLRLTW |
| 6424 | KLPDsPALAFFRKNWLRLTW |
| 6425 | KLPDsPALAKFFRKNWLRLTW |
| 6426 | KLPDsPALAKKFFRKNWLRLTW |
| 6427 | KLPDsPALAKYFFRKNWLRLTW |
| 6428 | KLPDsPALAYFFRKNWLRLTW |
| 6429 | KLPsPAPARKFFRKNWLRLTW |
| 6430 | KLPTsPLKMKFFRKNWLRLTW |
| 6431 | KLPTsPLKMYFFRKNWLRLTW |
| 6432 | KLPTtPVKAKFFRKNWLRLTW |
| 6433 | KLPTtPVKAYFFRKNWLRLTW |
| 6434 | KLQEFLQtLFFRKNWLRLTW |
| 6435 | KLQVtSLSVFFRKNWLRLTW |
| 6436 | KLRsPFLQKFFRKNWLRLTW |
| 6437 | KLRsPFLQYFFRKNWLRLTW |
| 6438 | KLRSsPREAKFFRKNWLRLTW |
| 6439 | KLRTsPTFKFFRKNWLRLTW |
| 6440 | KLsGDQPAARFFRKNWLRLTW |
| 6441 | KLSGLsFFFRKNWLRLTW |
| 6442 | KLSsLGNLKFFRKNWLRLTW |
| 6443 | KLSsLGNLKKFFRKNWLRLTW |
| 6444 | KLSsLGNLKYFFRKNWLRLTW |
| 6445 | KLSsPRGGMKFFRKNWLRLTW |
| 6446 | KLSsPRGGMKKFFRKNWLRLTW |
| 6447 | KLSsPRGGMKYFFRKNWLRLTW |
| 6448 | KLsVIAEDSESGKQNFFRKNWLRLTW |
| 6449 | KLsVIAEDSESGKQNPFFRKNWLRLTW |
| 6450 | KLsVIAEDSESGKQNPGFFRKNWLRLTW |
| 6451 | KLVSFHDDsDEDLFFRKNWLRLTW |
| 6452 | KLYsEIDIKVFFRKNWLRLTW |
| 6453 | KLYsGNMEKFFRKNWLRLTW |
| 6454 | KMAsLLHQVFFRKNWLRLTW |
| 6455 | KMAsPELERLFFRKNWLRLTW |
| 6456 | KMAsPELERVFFRKNWLRLTW |
| 6457 | KMDIVsSQKVFFRKNWLRLTW |
| 6458 | KMDsFLDMQLFFRKNWLRLTW |
| 6459 | KMDsFLDMQVFFRKNWLRLTW |
| 6460 | KMDsPRVTVFFRKNWLRLTW |
| 6461 | KMDsPTKVKKFFRKNWLRLTW |
| 6462 | KMFPDtPLALFFRKNWLRLTW |
| 6463 | KMFPDtPLAVFFRKNWLRLTW |
| 6464 | KMFsGTVRKFFRKNWLRLTW |
| 6465 | KMFsGVFVKVFFRKNWLRLTW |
| 6466 | KMFsKQQGKFFRKNWLRLTW |
| 6467 | KMFsPAHKKFFRKNWLRLTW |
| 6468 | KMFsPSKEAELFFRKNWLRLTW |
| 6469 | KMFsPSKEAEVFFRKNWLRLTW |
| 6470 | KMHGsLARAGKFFRKNWLRLTW |
| 6471 | KMIDIVsSQKVFFRKNWLRLTW |
| 6472 | KMIDRTEsLFFRKNWLRLTW |
| 6473 | KMIsSSSLKEKFFRKNWLRLTW |
| 6474 | KMKsNPDFLKFFRKNWLRLTW |
| 6475 | KMKsNPDFLKKFFRKNWLRLTW |
| 6476 | KMKsNPDFLKYFFRKNWLRLTW |
| 6477 | KMKSsPLIEKKFFRKNWLRLTW |
| 6478 | KMKtPLVAKFFRKNWLRLTW |
| 6479 | KMKtPLVARFFRKNWLRLTW |
| 6480 | KMLDFGSLsNLOVFFRKNWLRLTW |
| 6481 | KMLDFGSLsNLQVFFRKNWLRLTW |
| 6482 | KMLQFYPsLFFRKNWLRLTW |
| 6483 | KMLsPSNEKLFFRKNWLRLTW |
| 6484 | KMLsPSNEKVFFRKNWLRLTW |
| 6485 | KMLSSAQRtLFFRKNWLRLTW |
| 6486 | KMLSSAQRtVFFRKNWLRLTW |
| 6487 | KMLsVERIKFFRKNWLRLTW |
| 6488 | KMLtPIKEKFFRKNWLRLTW |
| 6489 | KMMAPDIsVFFRKNWLRLTW |
| 6490 | KMMsPKADVKLFFRKNWLRLTW |
| 6491 | KMMsPKADVKVFFRKNWLRLTW |
| 6492 | KMPTsPLKMKFFRKNWLRLTW |
| 6493 | KMPTtPVKAKFFRKNWLRLTW |
| 6494 | KMPTtPVKAYFFRKNWLRLTW |
| 6495 | KMRsPFLQKFFRKNWLRLTW |
| 6496 | KMRSsPREAKFFRKNWLRLTW |
| 6497 | KMRTsPTFKFFRKNWLRLTW |
| 6498 | KMSsLGNLKFFRKNWLRLTW |
| 6499 | KMSsLGNLKKFFRKNWLRLTW |
| 6500 | KMSsLGNLKYFFRKNWLRLTW |
| 6501 | KMSsPRGGMKFFRKNWLRLTW |
| 6502 | KMSsPRGGMKKFFRKNWLRLTW |
| 6503 | KMYsEIDIKVFFRKNWLRLTW |
| 6504 | KMYsGNMEKFFRKNWLRLTW |
| 6505 | KNRsWKYNFFRKNWLRLTW |
| 6506 | KNRsWKYNQFFRKNWLRLTW |
| 6507 | KNRsWKYNQSISLRFFRKNWLRLTW |
| 6508 | KNRsWKYNQSISLRRPFFRKNWLRLTW |
| 6509 | KPAsPARRFFFRKNWLRLTW |
| 6510 | KPAsPARRLFFRKNWLRLTW |
| 6511 | KPAsPARRMFFRKNWLRLTW |
| 6512 | KPAsPARRVFFRKNWLRLTW |
| 6513 | KPAsPKFIVTFFFRKNWLRLTW |
| 6514 | KPAsPKFIVTLFFRKNWLRLTW |
| 6515 | KPAsPKFIVTMFFRKNWLRLTW |
| 6516 | KPAsPKFIVTVFFRKNWLRLTW |
| 6517 | KPEsRRSSLFFRKNWLRLTW |
| 6518 | KPEsRRsSLLFFRKNWLRLTW |
| 6519 | KPEsRRSsLLFFRKNWLRLTW |
| 6520 | KPESRRSSLLFFRKNWLRLTW |
| 6521 | KPLIRsQSLFFRKNWLRLTW |
| 6522 | KPLIRSQsLFFRKNWLRLTW |
| 6523 | KPPHsPLVFFFRKNWLRLTW |
| 6524 | KPPHsPLVLFFRKNWLRLTW |
| 6525 | KPPHsPLVMFFRKNWLRLTW |
| 6526 | KPPHsPLWFFRKNWLRLTW |
| 6527 | KPPsPEHQSFFFRKNWLRLTW |
| 6528 | KPPsPEHQSLFFRKNWLRLTW |
| 6529 | KPPsPEHQSMFFRKNWLRLTW |
| 6530 | KPPsPEHQSVFFRKNWLRLTW |
| 6531 | KPPsPSPIEFFFRKNWLRLTW |
| 6532 | KPPsPSPIELFFRKNWLRLTW |
| 6533 | KPPsPSPIEMFFRKNWLRLTW |
| 6534 | KPPsPSPIEVFFRKNWLRLTW |
| 6535 | KPPtPGASFFFRKNWLRLTW |
| 6536 | KPPtPGASLFFRKNWLRLTW |
| 6537 | KPPtPGASMFFRKNWLRLTW |
| 6538 | KPPtPGASVFFRKNWLRLTW |
| 6539 | KPPYRSHsFFFRKNWLRLTW |
| 6540 | KPPYRSHsLFFRKNWLRLTW |
| 6541 | KPPYRSHsMFFRKNWLRLTW |
| 6542 | KPPYRSHsVFFRKNWLRLTW |
| 6543 | KPQTRGKtFFFRKNWLRLTW |
| 6544 | KPQTRGKtLFFRKNWLRLTW |
| 6545 | KPQTRGKtMFFRKNWLRLTW |
| 6546 | KPQTRGKtVFFRKNWLRLTW |
| 6547 | KPRPLsMDLFFRKNWLRLTW |
| 6548 | KPRPPPLsFFFRKNWLRLTW |
| 6549 | KPRPPPLsLFFRKNWLRLTW |
| 6550 | KPRPPPLsMFFRKNWLRLTW |
| 6551 | KPRPPPLsPFFRKNWLRLTW |
| 6552 | KPRPPPLsVFFRKNWLRLTW |
| 6553 | KPRRFsRsLFFRKNWLRLTW |
| 6554 | KPRRFsRSLFFRKNWLRLTW |
| 6555 | KPRsPDHVFFFRKNWLRLTW |
| 6556 | KPRsPDHVLFFRKNWLRLTW |
| 6557 | KPRsPDHVMFFRKNWLRLTW |
| 6558 | KPRsPDHWFFRKNWLRLTW |
| 6559 | KPRsPFSKIFFRKNWLRLTW |
| 6560 | KPRsPPRAFFFRKNWLRLTW |
| 6561 | KPRsPPRALFFRKNWLRLTW |
| 6562 | KPRsPPRALFFFRKNWLRLTW |
| 6563 | KPRsPPRALLFFRKNWLRLTW |
| 6564 | KPRsPPRALMFFRKNWLRLTW |
| 6565 | KPRsPPRALVFFRKNWLRLTW |
| 6566 | KPRsPPRALVFFFRKNWLRLTW |
| 6567 | KPRsPPRALVLFFRKNWLRLTW |
| 6568 | KPRsPPRALVLFFFRKNWLRLTW |
| 6569 | KPRsPPRALVLLFFRKNWLRLTW |
| 6570 | KPRsPPRALVLMFFRKNWLRLTW |
| 6571 | KPRsPPRALVLPFFRKNWLRLTW |
| 6572 | KPRsPPRALVLVFFRKNWLRLTW |
| 6573 | KPRsPPRALVMFFRKNWLRLTW |
| 6574 | KPRsPPRALWFFRKNWLRLTW |
| 6575 | KPRsPPRAMFFRKNWLRLTW |
| 6576 | KPRsPPRAVFFRKNWLRLTW |
| 6577 | KPRsPWEFFFRKNWLRLTW |
| 6578 | KPRsPWELFFRKNWLRLTW |
| 6579 | KPRsPWEMFFRKNWLRLTW |
| 6580 | KPRsPWEVFFRKNWLRLTW |
| 6581 | KPSsPRGSLFFRKNWLRLTW |
| 6582 | KPSsPRGSLLFFRKNWLRLTW |
| 6583 | KPVsPKSGTLFFRKNWLRLTW |
| 6584 | KPYsPLASFFFRKNWLRLTW |
| 6585 | KPYsPLASLFFRKNWLRLTW |
| 6586 | KPYsPLASMFFRKNWLRLTW |
| 6587 | KPYsPLASVFFRKNWLRLTW |
| 6588 | KQDsLVINLFFRKNWLRLTW |
| 6589 | KRAsFAKSFFFRKNWLRLTW |
| 6590 | KRAsFAKSKFFRKNWLRLTW |
| 6591 | KRAsFAKSLFFRKNWLRLTW |
| 6592 | KRAsFAKSMFFRKNWLRLTW |
| 6593 | KRAsFAKSRFFRKNWLRLTW |
| 6594 | KRAsFAKSVFFRKNWLRLTW |
| 6595 | KRAsFAKSYFFRKNWLRLTW |
| 6596 | KRAsGQAFEFFFRKNWLRLTW |
| 6597 | KRAsGQAFEKFFRKNWLRLTW |
| 6598 | KRAsGQAFELFFRKNWLRLTW |
| 6599 | KRAsGQAFERFFRKNWLRLTW |
| 6600 | KRAsGQAFEYFFRKNWLRLTW |
| 6601 | KRASsPFRFFFRKNWLRLTW |
| 6602 | KRASsPFRKFFRKNWLRLTW |
| 6603 | KRASsPFRLFFRKNWLRLTW |
| 6604 | KRASsPFRMFFRKNWLRLTW |
| 6605 | KRASsPFRRFFRKNWLRLTW |
| 6606 | KRASsPFRYFFRKNWLRLTW |
| 6607 | KRAsVFVKFFFRKNWLRLTW |
| 6608 | KRAsVFVKKFFRKNWLRLTW |
| 6609 | KRAsVFVKLFFRKNWLRLTW |
| 6610 | KRAsVFVKMFFRKNWLRLTW |
| 6611 | KRAsVFVKRFFRKNWLRLTW |
| 6612 | KRAsVFVKYFFRKNWLRLTW |
| 6613 | KRAsYILRLFFRKNWLRLTW |
| 6614 | KRFsFKFFFRKNWLRLTW |
| 6615 | KRFsFKKFFRKNWLRLTW |
| 6616 | KRFsFKKsFFFRKNWLRLTW |
| 6617 | KRFsFKKSFFFRKNWLRLTW |
| 6618 | KRFsFKKSKFFRKNWLRLTW |
| 6619 | KRFsFKKSLFFRKNWLRLTW |
| 6620 | KRFsFKKSMFFRKNWLRLTW |
| 6621 | KRFsFKKSRFFRKNWLRLTW |
| 6622 | KRFsFKKSYFFRKNWLRLTW |
| 6623 | KRFsFKLFFRKNWLRLTW |
| 6624 | KRFsFKMFFRKNWLRLTW |
| 6625 | KRFsFKRFFRKNWLRLTW |
| 6626 | KRFsFKsSFFFRKNWLRLTW |
| 6627 | KRFsFKYFFRKNWLRLTW |
| 6628 | KRFsGTVRFFFRKNWLRLTW |
| 6629 | KRFsGTVRKFFRKNWLRLTW |
| 6630 | KRFsGTVRLFFRKNWLRLTW |
| 6631 | KRFsGTVRMFFRKNWLRLTW |
| 6632 | KRFsGTVRRFFRKNWLRLTW |
| 6633 | KRFsGTVRYFFRKNWLRLTW |
| 6634 | KRIVIsPKPFFFRKNWLRLTW |
| 6635 | KRKsFTSLYFFRKNWLRLTW |
| 6636 | KRLEKsPSFFFRKNWLRLTW |
| 6637 | KRLEKSPsFFFRKNWLRLTW |
| 6638 | KRLsPAPQFFFRKNWLRLTW |
| 6639 | KRLsPAPQKFFRKNWLRLTW |
| 6640 | KRLsPAPQLFFRKNWLRLTW |
| 6641 | KRLsPAPQMFFRKNWLRLTW |
| 6642 | KRLsPAPQRFFRKNWLRLTW |
| 6643 | KRLsPAPQYFFRKNWLRLTW |
| 6644 | KRLsTSPVRLFFRKNWLRLTW |
| 6645 | KRLsVERIFFFRKNWLRLTW |
| 6646 | KRLsVERIKFFRKNWLRLTW |
| 6647 | KRLsVERILFFRKNWLRLTW |
| 6648 | KRLsVERIMFFRKNWLRLTW |
| 6649 | KRLsVERIRFFRKNWLRLTW |
| 6650 | KRLsVERIYFFRKNWLRLTW |
| 6651 | KRMsPKEFFFRKNWLRLTW |
| 6652 | KRMsPKEKFFRKNWLRLTW |
| 6653 | KRMsPKELFFRKNWLRLTW |
| 6654 | KRMsPKERFFRKNWLRLTW |
| 6655 | KRMsPKEYFFRKNWLRLTW |
| 6656 | KRmsPKPELFFRKNWLRLTW |
| 6657 | KRMsPKPELFFRKNWLRLTW |
| 6658 | KRMsPKPFFFRKNWLRLTW |
| 6659 | KRMsPKPKFFRKNWLRLTW |
| 6660 | KRMsPKPLFFRKNWLRLTW |
| 6661 | KRMsPKPMFFRKNWLRLTW |
| 6662 | KRMsPKPRFFRKNWLRLTW |
| 6663 | KRMsPKPYFFRKNWLRLTW |
| 6664 | KRPEsPPSIFFRKNWLRLTW |
| 6665 | KRWQsPVTKFFRKNWLRLTW |
| 6666 | KRYsEPVSLFFRKNWLRLTW |
| 6667 | KRYsGNMEFFFRKNWLRLTW |
| 6668 | KRYsGNMEKFFRKNWLRLTW |
| 6669 | KRYsGNMELFFRKNWLRLTW |
| 6670 | KRYsGNMEMFFRKNWLRLTW |
| 6671 | KRYsGNMERFFRKNWLRLTW |
| 6672 | KRYsGNmEYFFRKNWLRLTW |
| 6673 | KRYsGNMEYFFRKNWLRLTW |
| 6674 | KRYsRALYLFFRKNWLRLTW |
| 6675 | KSDsRQERYFFRKNWLRLTW |
| 6676 | KSEsRQERYFFRKNWLRLTW |
| 6677 | KSGELLAtWFFRKNWLRLTW |
| 6678 | KSKsNPDFLKKFFRKNWLRLTW |
| 6679 | KSKsNPFLKKFFRKNWLRLTW |
| 6680 | KSKtPLVAKFFRKNWLRLTW |
| 6681 | KSKtPLVARFFRKNWLRLTW |
| 6682 | KSKtPLVAYFFRKNWLRLTW |
| 6683 | KsLVRLLLLFFRKNWLRLTW |
| 6684 | KSSsLGNLKKFFRKNWLRLTW |
| 6685 | KsVKALSSLHGDDQFFRKNWLRLTW |
| 6686 | KsVKALSSLHGDDQDFFRKNWLRLTW |
| 6687 | KsVKALSSLHGDDQDsEDEFFRKNWLRLTW |
| 6688 | KSVKALSSLHGDDQDsEDEFFRKNWLRLTW |
| 6689 | KTDsRQERYFFRKNWLRLTW |
| 6690 | KTEsRQERYFFRKNWLRLTW |
| 6691 | KtLSPGKNGWKFFRKNWLRLTW |
| 6692 | KtLSPGKNGWYFFRKNWLRLTW |
| 6693 | KTMsGTFLLFFRKNWLRLTW |
| 6694 | KTMsPSQMIMFFRKNWLRLTW |
| 6695 | KTPTsPLKMKFFRKNWLRLTW |
| 6696 | KTPTsPLKMYFFRKNWLRLTW |
| 6697 | KTWKGsIGLFFRKNWLRLTW |
| 6698 | KVAsLLHQVFFRKNWLRLTW |
| 6699 | KVDsPVIFFFRKNWLRLTW |
| 6700 | KVHGsLARAGKFFRKNWLRLTW |
| 6701 | KVHGsLARAGYFFRKNWLRLTW |
| 6702 | KVKSsPLIEKKFFRKNWLRLTW |
| 6703 | KVKsSPLIEKLFFRKNWLRLTW |
| 6704 | KVKSsPLIEKLFFRKNWLRLTW |
| 6705 | KVKSsPLIEKYFFRKNWLRLTW |
| 6706 | KVLsKEFHLFFRKNWLRLTW |
| 6707 | KVLSPtAAKFFRKNWLRLTW |
| 6708 | KVLsSLVTLFFRKNWLRLTW |
| 6709 | KVLsTEEMELFFRKNWLRLTW |
| 6710 | KVLStEEMELFFRKNWLRLTW |
| 6711 | KVLtPIKeKFFRKNWLRLTW |
| 6712 | KVLtPIKEKFFRKNWLRLTW |
| 6713 | KVLtPIKEYFFRKNWLRLTW |
| 6714 | KVPDsPALAKFFRKNWLRLTW |
| 6715 | KVPDsPALAKKFFRKNWLRLTW |
| 6716 | KVPDsPALAKYFFRKNWLRLTW |
| 6717 | KVPDsPALAYFFRKNWLRLTW |
| 6718 | KVPTsPLKMYFFRKNWLRLTW |
| 6719 | KVQsLRRALFFRKNWLRLTW |
| 6720 | KVQVtSLSVFFRKNWLRLTW |
| 6721 | KVYsSSEFLFFRKNWLRLTW |
| 6722 | KYIsGPHELFFRKNWLRLTW |
| 6723 | KYsPGKLRGNFFRKNWLRLTW |
| 6724 | LGGGGAGLSGRASGGAQsPLRYLHVFFRKNWLRLTW |
| 6725 | LKLsYLTWVFFRKNWLRLTW |
| 6726 | LLAsPGHISVFFRKNWLRLTW |
| 6727 | LLDPSRSYsYFFRKNWLRLTW |
| 6728 | LLDtPVKTQYFFRKNWLRLTW |
| 6729 | LLFsPVTSLFFRKNWLRLTW |
| 6730 | LLFsPVTSVFFRKNWLRLTW |
| 6731 | LLLsEEVELFFRKNWLRLTW |
| 6732 | LLNKSsPVKFFRKNWLRLTW |
| 6733 | LLNKSsPVKKFFRKNWLRLTW |
| 6734 | LLNKSsPVKYFFRKNWLRLTW |
| 6735 | LMFsPVTSLFFRKNWLRLTW |
| 6736 | LMFsPVTSVFFRKNWLRLTW |
| 6737 | LMFsVTSIFFRKNWLRLTW |
| 6738 | LMFsVTSLFFRKNWLRLTW |
| 6739 | LMNKSsPVKFFRKNWLRLTW |
| 6740 | LMNKSsPVKKFFRKNWLRLTW |
| 6741 | LMNKSsPVKYFFRKNWLRLTW |
| 6742 | LPAsPHQFFFRKNWLRLTW |
| 6743 | LPAsPHQLFFRKNWLRLTW |
| 6744 | LPAsPHQMFFRKNWLRLTW |
| 6745 | LPAsPHQVFFRKNWLRLTW |
| 6746 | LPAsPRARFFFRKNWLRLTW |
| 6747 | LPAsPRARLFFRKNWLRLTW |
| 6748 | LPAsPRARMFFRKNWLRLTW |
| 6749 | LPAsPRARVFFRKNWLRLTW |
| 6750 | LPIFSRLsFFFRKNWLRLTW |
| 6751 | LPIFSRLsIFFRKNWLRLTW |
| 6752 | LPIFSRLsLFFRKNWLRLTW |
| 6753 | LPIFSRLsMFFRKNWLRLTW |
| 6754 | LPIFSRLsVFFRKNWLRLTW |
| 6755 | LPKGLsASLFFRKNWLRLTW |
| 6756 | LPKGLSAsLFFRKNWLRLTW |
| 6757 | LPKsPPYTAFFFRKNWLRLTW |
| 6758 | LPKsPPYTALFFRKNWLRLTW |
| 6759 | LPKsPPYTAMFFRKNWLRLTW |
| 6760 | LPKsPPYTAVFFRKNWLRLTW |
| 6761 | LPRGSsPSVFFFRKNWLRLTW |
| 6762 | LPRGsSPSVLFFRKNWLRLTW |
| 6763 | LPRGSsPSVLFFRKNWLRLTW |
| 6764 | LPRGSsPSVMFFRKNWLRLTW |
| 6765 | LPRGSsPSWFFRKNWLRLTW |
| 6766 | LPRmIsHSELFFRKNWLRLTW |
| 6767 | LPRMIsHSELFFRKNWLRLTW |
| 6768 | LPRPAsPALFFRKNWLRLTW |
| 6769 | LPRSSsMAAFFRKNWLRLTW |
| 6770 | LPRSSsMAAGLFFRKNWLRLTW |
| 6771 | LPRtPRPELFFRKNWLRLTW |
| 6772 | LPVsPRLQLFFRKNWLRLTW |
| 6773 | LQLsPLKGLSLFFRKNWLRLTW |
| 6774 | LQNItENQLFFRKNWLRLTW |
| 6775 | LSDPSRSYsYFFRKNWLRLTW |
| 6776 | LSDsDTEAKLFFRKNWLRLTW |
| 6777 | LSDsDTEAKYFFRKNWLRLTW |
| 6778 | LSDtPVKTQYFFRKNWLRLTW |
| 6779 | LSEPSRSYsYFFRKNWLRLTW |
| 6780 | LSEsDTEAKLFFRKNWLRLTW |
| 6781 | LSEsDTEAKYFFRKNWLRLTW |
| 6782 | LSEtPVKTQYFFRKNWLRLTW |
| 6783 | LSKFRMPQPSSGREsPRHFFRKNWLRLTW |
| 6784 | LSSsVIRELFFRKNWLRLTW |
| 6785 | LTDPSRSYsYFFRKNWLRLTW |
| 6786 | LTDPSsPTISSYFFRKNWLRLTW |
| 6787 | LTDsDTEAKLFFRKNWLRLTW |
| 6788 | LTDsDTEAKYFFRKNWLRLTW |
| 6789 | LTDtPVKTQYFFRKNWLRLTW |
| 6790 | LTEPSRSYsYFFRKNWLRLTW |
| 6791 | LTEsDTEAKLFFRKNWLRLTW |
| 6792 | LTEsDTEAKYFFRKNWLRLTW |
| 6793 | LTEtPVKTOYFFRKNWLRLTW |
| 6794 | LTEtPVKTQYFFRKNWLRLTW |
| 6795 | MLAEsPSVPRLFFRKNWLRLTW |
| 6796 | MLAEsPSVPRVFFRKNWLRLTW |
| 6797 | MLRsPPRVSKFFRKNWLRLTW |
| 6798 | MMRsPPRVSKFFRKNWLRLTW |
| 6799 | MPRPsIKKAQNSQAARQFFRKNWLRLTW |
| 6800 | MPRQPsAIRMFFRKNWLRLTW |
| 6801 | MPRQPsATRFFFRKNWLRLTW |
| 6802 | MPRQPsATRLFFRKNWLRLTW |
| 6803 | MPRQPsATRMFFRKNWLRLTW |
| 6804 | MPRQPsATRVFFRKNWLRLTW |
| 6805 | MRLsEWLQLFFRKNWLRLTW |
| 6806 | MRLsRELQFFFRKNWLRLTW |
| 6807 | MRLsRELQKFFRKNWLRLTW |
| 6808 | MRLsRELQLFFRKNWLRLTW |
| 6809 | MRLsRELQMFFRKNWLRLTW |
| 6810 | MRLsRELQRFFRKNWLRLTW |
| 6811 | MRLsRELQYFFRKNWLRLTW |
| 6812 | MSDtYRLKYFFRKNWLRLTW |
| 6813 | MSEtYRLKYFFRKNWLRLTW |
| 6814 | MTDtYRLKYFFRKNWLRLTW |
| 6815 | MTEtYRLKYFFRKNWLRLTW |
| 6816 | MTRsPPRVSKFFRKNWLRLTW |
| 6817 | MTRsPPRVSYFFRKNWLRLTW |
| 6818 | NAPPAYEKLsAEFFRKNWLRLTW |
| 6819 | NFKsPVKTIRFFRKNWLRLTW |
| 6820 | NLELSKFRMPQPSSGREsPRHFFRKNWLRLTW |
| 6821 | NLGsRNHVHQLFFRKNWLRLTW |
| 6822 | NLLsPDGKMISVFFRKNWLRLTW |
| 6823 | NLVERKNsKFFRKNWLRLTW |
| 6824 | NLVERKNsLFFRKNWLRLTW |
| 6825 | NMDsPGPMLFFRKNWLRLTW |
| 6826 | NMVERKNsKFFRKNWLRLTW |
| 6827 | NMVERKNsLFFRKNWLRLTW |
| 6828 | NRAMRRVsSVPSRFFRKNWLRLTW |
| 6829 | NRAMRRVsSVPSRAQFFRKNWLRLTW |
| 6830 | NRsWKYNQSISLRFFRKNWLRLTW |
| 6831 | NRsWKYNQSISLRRPFFRKNWLRLTW |
| 6832 | NRYtNRWTFFFRKNWLRLTW |
| 6833 | NRYtNRWTKFFRKNWLRLTW |
| 6834 | NRYtNRWTLFFRKNWLRLTW |
| 6835 | NRYtNRWTMFFRKNWLRLTW |
| 6836 | NRYtNRWTRFFRKNWLRLTW |
| 6837 | NRYtNRWTYFFRKNWLRLTW |
| 6838 | NSDsPLRYFFRKNWLRLTW |
| 6839 | NSEsPLRYFFRKNWLRLTW |
| 6840 | NTDsPLRYFFRKNWLRLTW |
| 6841 | NTEsPLRYFFRKNWLRLTW |
| 6842 | NYVERKNsKFFRKNWLRLTW |
| 6843 | NYVERKNsLFFRKNWLRLTW |
| 6844 | NYVERKNsYFFRKNWLRLTW |
| 6845 | PARsPVTEIFFRKNWLRLTW |
| 6846 | PAYEKLsAEFFRKNWLRLTW |
| 6847 | PAYEKLsAEQSPFFRKNWLRLTW |
| 6848 | PmVTLsLNLFFRKNWLRLTW |
| 6849 | PMVTLsLNLFFRKNWLRLTW |
| 6850 | PNAPPAYEKLsAFFRKNWLRLTW |
| 6851 | PPAYEKLsAFFRKNWLRLTW |
| 6852 | PPAYEKLsAEQSFFRKNWLRLTW |
| 6853 | PPLPEDSIKVIRNMRAAsPPAFFRKNWLRLTW |
| 6854 | PYDPALGsPSRFFRKNWLRLTW |
| 6855 | QAASNFKsPVKTIRFFRKNWLRLTW |
| 6856 | QLDsPQRALYFFRKNWLRLTW |
| 6857 | QLEsPQRALYFFRKNWLRLTW |
| 6858 | QLFsPKKGQKFFRKNWLRLTW |
| 6859 | QMFsPKKGQKFFRKNWLRLTW |
| 6860 | QPQRRsLRLFFRKNWLRLTW |
| 6861 | QPRsPGPDYSFFFRKNWLRLTW |
| 6862 | QPRsPGPDYSLFFRKNWLRLTW |
| 6863 | QPRsPGPDYSMFFRKNWLRLTW |
| 6864 | QPRsPGPDYSVFFRKNWLRLTW |
| 6865 | QPRtPsPLVFFFRKNWLRLTW |
| 6866 | QPRtPsPLVFFFRKNWLRLTW |
| 6867 | QPRtPsPLVLFFRKNWLRLTW |
| 6868 | QPRtPsPLVLFFRKNWLRLTW |
| 6869 | QPRtPsPLVMFFRKNWLRLTW |
| 6870 | QPRtPSPLVMFFRKNWLRLTW |
| 6871 | QPRtPsPLWFFRKNWLRLTW |
| 6872 | QPRtPSPLWFFRKNWLRLTW |
| 6873 | QPSFPsVLPAFFRKNWLRLTW |
| 6874 | QRLsPLSAAYFFRKNWLRLTW |
| 6875 | QSDsPQRALYFFRKNWLRLTW |
| 6876 | QSEsPQRALYFFRKNWLRLTW |
| 6877 | QTDsPQRALYFFRKNWLRLTW |
| 6878 | QTEsPQRALYFFRKNWLRLTW |
| 6879 | QVAMPVKKSPRRSsSDEQGLSYSSLKNVFFRKNWLRLTW |
| 6880 | QVFsPKKGQKFFRKNWLRLTW |
| 6881 | QVFsPKKGQYFFRKNWLRLTW |
| 6882 | RADsPVHMFFRKNWLRLTW |
| 6883 | RAFsFSKTPKFFRKNWLRLTW |
| 6884 | RAFsFSKTPYFFRKNWLRLTW |
| 6885 | RAFsVKFEVFFRKNWLRLTW |
| 6886 | RAHsEPLALFFRKNWLRLTW |
| 6887 | RAHsSPASLFFRKNWLRLTW |
| 6888 | RAHSsPASLFFRKNWLRLTW |
| 6889 | RAKsPISLKFFRKNWLRLTW |
| 6890 | RAKsPISLYFFRKNWLRLTW |
| 6891 | RAPsPSSRFFFRKNWLRLTW |
| 6892 | RAPsPSSRLFFRKNWLRLTW |
| 6893 | RAPsPSSRMFFRKNWLRLTW |
| 6894 | RAPsPSSRVFFRKNWLRLTW |
| 6895 | RARGIsPIVFFFRKNWLRLTW |
| 6896 | RASsDIVsLFFRKNWLRLTW |
| 6897 | RASsDIVSLFFRKNWLRLTW |
| 6898 | RASsLSITVFFRKNWLRLTW |
| 6899 | REAPsPLmIFFRKNWLRLTW |
| 6900 | REAPsPLMIFFRKNWLRLTW |
| 6901 | REAsPAPLAFFRKNWLRLTW |
| 6902 | REAsPRLRVFFRKNWLRLTW |
| 6903 | REAsPSRLSVFFRKNWLRLTW |
| 6904 | REDsTPGKVFLFFRKNWLRLTW |
| 6905 | REIMGtPEYLFFRKNWLRLTW |
| 6906 | REKsPGRmLFFRKNWLRLTW |
| 6907 | REKsPGRMLFFRKNWLRLTW |
| 6908 | REKsPLFQFFFRKNWLRLTW |
| 6909 | REKsPLFQWFFRKNWLRLTW |
| 6910 | REKsPLFQYFFRKNWLRLTW |
| 6911 | RELARKGsLFFRKNWLRLTW |
| 6912 | RELsPLISLFFRKNWLRLTW |
| 6913 | REPsPLPELFFRKNWLRLTW |
| 6914 | RERsPSPSFFFRKNWLRLTW |
| 6915 | RESsPTRRLFFRKNWLRLTW |
| 6916 | REVsPAPAVFFRKNWLRLTW |
| 6917 | REYGsTSSIFFRKNWLRLTW |
| 6918 | RFKtQPVTFFFRKNWLRLTW |
| 6919 | RGDGYGtFFFRKNWLRLTW |
| 6920 | RGDsPKIDLFFRKNWLRLTW |
| 6921 | RIDsKDSASELFFRKNWLRLTW |
| 6922 | RIGsPLSPKFFRKNWLRLTW |
| 6923 | RILsGWTKFFRKNWLRLTW |
| 6924 | RILsGWTYFFRKNWLRLTW |
| 6925 | RILsPSMASKFFRKNWLRLTW |
| 6926 | RILsPSMASYFFRKNWLRLTW |
| 6927 | RINsFEEHVFFRKNWLRLTW |
| 6928 | RIQsKLYRAFFRKNWLRLTW |
| 6929 | RIQyIQSRFFFRKNWLRLTW |
| 6930 | RIQyIQSRFYFFRKNWLRLTW |
| 6931 | RIsHELDSFFRKNWLRLTW |
| 6932 | RITsLIVHVFFRKNWLRLTW |
| 6933 | RIVQyIQSRFFRKNWLRLTW |
| 6934 | RIYQyIQFFRKNWLRLTW |
| 6935 | RIYQyIQSKFFRKNWLRLTW |
| 6936 | RIYQyIQSRFFRKNWLRLTW |
| 6937 | RIYQyIQSRFFFRKNWLRLTW |
| 6938 | RIYQyIQSRFKFFRKNWLRLTW |
| 6939 | RIYQyIQSRFYFFRKNWLRLTW |
| 6940 | RIYQyIQSRKFFRKNWLRLTW |
| 6941 | RIYQyIQSRYFFRKNWLRLTW |
| 6942 | RIYQyIQSYFFRKNWLRLTW |
| 6943 | RIYQyLQSRFFFRKNWLRLTW |
| 6944 | RIYQyLQSRFYFFRKNWLRLTW |
| 6945 | RKLRsLEQLFFRKNWLRLTW |
| 6946 | RKLsVILIKFFRKNWLRLTW |
| 6947 | RKLsVILILFFRKNWLRLTW |
| 6948 | RKLsVILIYFFRKNWLRLTW |
| 6949 | RKPsIVTKYFFRKNWLRLTW |
| 6950 | RKSsIIIRMFFRKNWLRLTW |
| 6951 | RLAsASRALFFRKNWLRLTW |
| 6952 | RLAsFAVRKFFRKNWLRLTW |
| 6953 | RLAsFAVRYFFRKNWLRLTW |
| 6954 | RLAsIELPSMFFRKNWLRLTW |
| 6955 | RLAsIELPSMAVFFRKNWLRLTW |
| 6956 | RLAsIELPSVFFRKNWLRLTW |
| 6957 | RLAsLNAEALFFRKNWLRLTW |
| 6958 | RLAsLNAEAVFFRKNWLRLTW |
| 6959 | RLAsLQSEVFFRKNWLRLTW |
| 6960 | RLAsLSISVFFRKNWLRLTW |
| 6961 | RLAsPLVHKFFRKNWLRLTW |
| 6962 | RLAsPLVHYFFRKNWLRLTW |
| 6963 | RLAsPPPPPKFFRKNWLRLTW |
| 6964 | RLAsPPPPPYFFRKNWLRLTW |
| 6965 | RLAsPTSGVFFRKNWLRLTW |
| 6966 | RLAsPTSGVKFFRKNWLRLTW |
| 6967 | RLAsPTSGVKKFFRKNWLRLTW |
| 6968 | RLAsPTSGVKRFFRKNWLRLTW |
| 6969 | RLAsPTSGVKYFFRKNWLRLTW |
| 6970 | RLAsRPLLLFFRKNWLRLTW |
| 6971 | RLAsSATQVHKFFRKNWLRLTW |
| 6972 | RLAsYLDKVFFRKNWLRLTW |
| 6973 | RLAsYLDRVFFRKNWLRLTW |
| 6974 | RLDsTPGKVFLFFRKNWLRLTW |
| 6975 | RLDsTPGKVFVFFRKNWLRLTW |
| 6976 | RLDsYLRAPFFRKNWLRLTW |
| 6977 | RLDsYVRFFRKNWLRLTW |
| 6978 | RLDsYVRSFFRKNWLRLTW |
| 6979 | RLDsYVRSLFFRKNWLRLTW |
| 6980 | RLDsYVRSVFFRKNWLRLTW |
| 6981 | RLDtGPQSLFFRKNWLRLTW |
| 6982 | RLEsANRRLFFRKNWLRLTW |
| 6983 | RLFsFSKTPKFFRKNWLRLTW |
| 6984 | RLFsKELFFRKNWLRLTW |
| 6985 | RLFsKELRFFRKNWLRLTW |
| 6986 | RLFsKELRCFFRKNWLRLTW |
| 6987 | RLFsKELRVFFRKNWLRLTW |
| 6988 | RLFSLsNPSLFFRKNWLRLTW |
| 6989 | RLFsPTYGLFFRKNWLRLTW |
| 6990 | RLFsPTYGVFFRKNWLRLTW |
| 6991 | RLFsQGQDVFFRKNWLRLTW |
| 6992 | RLFVGsIPKFFRKNWLRLTW |
| 6993 | RLGsFHELLLFFRKNWLRLTW |
| 6994 | RLIsFKAEVFFRKNWLRLTW |
| 6995 | RLIsPYKKKFFRKNWLRLTW |
| 6996 | RLIsQDVKLFFRKNWLRLTW |
| 6997 | RLIsQDVKVFFRKNWLRLTW |
| 6998 | RLKLPsGSKFFRKNWLRLTW |
| 6999 | RLKLPsGSKKFFRKNWLRLTW |
| 7000 | RLKLPsGSKYFFRKNWLRLTW |
| 7001 | RLKsDERPVHIFFRKNWLRLTW |
| 7002 | RLKsPFRKKFFRKNWLRLTW |
| 7003 | RLKsPGsGHVKFFRKNWLRLTW |
| 7004 | RLKsPISLKFFRKNWLRLTW |
| 7005 | RLKsPISLYFFRKNWLRLTW |
| 7006 | RLKsPSPKSEKFFRKNWLRLTW |
| 7007 | RLKsPSPKSERFFRKNWLRLTW |
| 7008 | RLKtPTSQSYKFFRKNWLRLTW |
| 7009 | RLKtPTSQSYRFFRKNWLRLTW |
| 7010 | RLKTtPLRKFFRKNWLRLTW |
| 7011 | RLKTtPLRRFFRKNWLRLTW |
| 7012 | RLLDPsSPLALFFRKNWLRLTW |
| 7013 | RLLDPSsPLALFFRKNWLRLTW |
| 7014 | RLLDRSPsRSAKFFRKNWLRLTW |
| 7015 | RLLDRSPsRSAYFFRKNWLRLTW |
| 7016 | RLLsDGQQHLFFRKNWLRLTW |
| 7017 | RLLsDLEELFFRKNWLRLTW |
| 7018 | RLLsDQTRLFFRKNWLRLTW |
| 7019 | RLLsFQRYLFFRKNWLRLTW |
| 7020 | RLLsGWTKFFRKNWLRLTW |
| 7021 | RLLsGWTYFFRKNWLRLTW |
| 7022 | RLLsHISEAFFRKNWLRLTW |
| 7023 | RLLsHISEVFFRKNWLRLTW |
| 7024 | RLLsPLSSAFFRKNWLRLTW |
| 7025 | RLLsPLSSARLFFRKNWLRLTW |
| 7026 | RLLsPLSSVFFRKNWLRLTW |
| 7027 | RLLsPQQPALFFRKNWLRLTW |
| 7028 | RLLsPRPSLFFRKNWLRLTW |
| 7029 | RLLsPRPSLLFFRKNWLRLTW |
| 7030 | RLLsPSMASKFFRKNWLRLTW |
| 7031 | RLLsSGVSEIFFRKNWLRLTW |
| 7032 | RLLsSGVSEVFFRKNWLRLTW |
| 7033 | RLLsTDAEAVFFRKNWLRLTW |
| 7034 | RLLsVEIVKFFRKNWLRLTW |
| 7035 | RLLsVEIVYFFRKNWLRLTW |
| 7036 | RLLsVHDFDFFFRKNWLRLTW |
| 7037 | RLLsVILIKFFRKNWLRLTW |
| 7038 | RLMsMPVAKFFRKNWLRLTW |
| 7039 | RLMsMPVAYFFRKNWLRLTW |
| 7040 | RLNtSDFQKLFFRKNWLRLTW |
| 7041 | RLPNRIPsLFFRKNWLRLTW |
| 7042 | RLPsFLKKNKFFRKNWLRLTW |
| 7043 | RLPsLVHGYFFRKNWLRLTW |
| 7044 | RLPsSTLKKFFRKNWLRLTW |
| 7045 | RLPsSTLKRFFRKNWLRLTW |
| 7046 | RLPsSTLKYFFRKNWLRLTW |
| 7047 | RLQsLIKNIFFRKNWLRLTW |
| 7048 | RLQsTSERLFFRKNWLRLTW |
| 7049 | RLQsTSERVFFRKNWLRLTW |
| 7050 | RLR(sLss)PTVTLFFRKNWLRLTW |
| 7051 | RLR(sLss)PTVTVFFRKNWLRLTW |
| 7052 | RLRQsPLATKFFRKNWLRLTW |
| 7053 | RLRQsPLATRFFRKNWLRLTW |
| 7054 | RLRQsPLATYFFRKNWLRLTW |
| 7055 | RLRRsPLLKFFRKNWLRLTW |
| 7056 | RLRsAGAAQKFFRKNWLRLTW |
| 7057 | RLRsLSSLREKFFRKNWLRLTW |
| 7058 | RLRsPPPVSKFFRKNWLRLTW |
| 7059 | RLRsYEDMIFFRKNWLRLTW |
| 7060 | RLRTsPITRKFFRKNWLRLTW |
| 7061 | RLRTsPITRRFFRKNWLRLTW |
| 7062 | RLSDtPPLLFFRKNWLRLTW |
| 7063 | RLSsLIRHKFFRKNWLRLTW |
| 7064 | RLSsLRASTSKFFRKNWLRLTW |
| 7065 | RLSsPISKKFFRKNWLRLTW |
| 7066 | RLSsPISKRFFRKNWLRLTW |
| 7067 | RLSsPISKYFFRKNWLRLTW |
| 7068 | RLsSPLHFVFFRKNWLRLTW |
| 7069 | RLSsPLHFVFFRKNWLRLTW |
| 7070 | RLSsPVLHKFFRKNWLRLTW |
| 7071 | RLSsPVLHRFFRKNWLRLTW |
| 7072 | RLSsPVLHYFFRKNWLRLTW |
| 7073 | RLSsRFSSKFFRKNWLRLTW |
| 7074 | RLSsRFSSRFFRKNWLRLTW |
| 7075 | RLSsRFSSYFFRKNWLRLTW |
| 7076 | RLSsRYSQKFFRKNWLRLTW |
| 7077 | RLSsRYSQYFFRKNWLRLTW |
| 7078 | RLSsVKLISKFFRKNWLRLTW |
| 7079 | RLSsVKLISYFFRKNWLRLTW |
| 7080 | RLTFsPTYGVFFRKNWLRLTW |
| 7081 | RLVsLSMRKFFRKNWLRLTW |
| 7082 | RLVsLSMRYFFRKNWLRLTW |
| 7083 | RLYKsPLRHFFRKNWLRLTW |
| 7084 | RLYKsPLRKFFRKNWLRLTW |
| 7085 | RLYQyIQSKFFRKNWLRLTW |
| 7086 | RLYQyIQSRFFRKNWLRLTW |
| 7087 | RLYQyIQSRFKFFRKNWLRLTW |
| 7088 | RLYQyIQSRFYFFRKNWLRLTW |
| 7089 | RLYQyIQSYFFRKNWLRLTW |
| 7090 | RLYQylOSKFFRKNWLRLTW |
| 7091 | RLYQyLQSRFFFRKNWLRLTW |
| 7092 | RLYQyLQSRFKFFRKNWLRLTW |
| 7093 | RLYQyLQSRFYFFRKNWLRLTW |
| 7094 | RLYQyLQSRKFFRKNWLRLTW |
| 7095 | RLYsGPMNKVFFRKNWLRLTW |
| 7096 | RLYsGSRsKFFRKNWLRLTW |
| 7097 | RLYsGSRsRFFRKNWLRLTW |
| 7098 | RLYsGSRsYFFRKNWLRLTW |
| 7099 | RLYsKSRDKFFRKNWLRLTW |
| 7100 | RLYsPDHRQKFFRKNWLRLTW |
| 7101 | RLYsPERSKFFRKNWLRLTW |
| 7102 | RLYsPRNSKFFRKNWLRLTW |
| 7103 | RLYSPYNHKFFRKNWLRLTW |
| 7104 | RLYsPYNHRFFRKNWLRLTW |
| 7105 | RLYsPYNHYFFRKNWLRLTW |
| 7106 | RLYSRsFSKFFRKNWLRLTW |
| 7107 | RLYSRsFSYFFRKNWLRLTW |
| 7108 | RLYsYPRQKFFRKNWLRLTW |
| 7109 | RLYVTTSTRTYsLGFFRKNWLRLTW |
| 7110 | RLYVTTSTRTYsLKFFRKNWLRLTW |
| 7111 | RLYVTTSTRTYsLYFFRKNWLRLTW |
| 7112 | RMAsPPPPPKFFRKNWLRLTW |
| 7113 | RMAsPTSGVFFRKNWLRLTW |
| 7114 | RMAsPTSGVKFFRKNWLRLTW |
| 7115 | RMAsPTSGVKKFFRKNWLRLTW |
| 7116 | RMAsPTSGVKRFFRKNWLRLTW |
| 7117 | RMAsPTSGVKYFFRKNWLRLTW |
| 7118 | RMAsSATQVHKFFRKNWLRLTW |
| 7119 | RMDsTPGKVFLFFRKNWLRLTW |
| 7120 | RMDsTPGKVFVFFRKNWLRLTW |
| 7121 | RMDsYVRSLFFRKNWLRLTW |
| 7122 | RMDsYVRSVFFRKNWLRLTW |
| 7123 | RMFPtPPSLFFRKNWLRLTW |
| 7124 | RMFsFSKTPKFFRKNWLRLTW |
| 7125 | RMFsKELRCFFRKNWLRLTW |
| 7126 | RMFsKELRVFFRKNWLRLTW |
| 7127 | RMFsPMEEKFFRKNWLRLTW |
| 7128 | RMFsPMEEKELLFFRKNWLRLTW |
| 7129 | RMFsPTYGLFFRKNWLRLTW |
| 7130 | RMFsPTYGVFFRKNWLRLTW |
| 7131 | RMIsPYKKKFFRKNWLRLTW |
| 7132 | RMIsQDVKLFFRKNWLRLTW |
| 7133 | RMIsQDVKVFFRKNWLRLTW |
| 7134 | RMIsTGSELFFRKNWLRLTW |
| 7135 | RMKLPsGSKFFRKNWLRLTW |
| 7136 | RMKLPsGSKKFFRKNWLRLTW |
| 7137 | RMKLPsGSKYFFRKNWLRLTW |
| 7138 | RMKsPFRKKFFRKNWLRLTW |
| 7139 | RMKsPGsGHVKFFRKNWLRLTW |
| 7140 | RMKsPSPKSEKFFRKNWLRLTW |
| 7141 | RMKtPTSQSYKFFRKNWLRLTW |
| 7142 | RMKtPTSQSYRFFRKNWLRLTW |
| 7143 | RMKTtPLRKFFRKNWLRLTW |
| 7144 | RMKTtPLRRFFRKNWLRLTW |
| 7145 | RMLDRSPsRSAKFFRKNWLRLTW |
| 7146 | RMLDRSPsRSAYFFRKNWLRLTW |
| 7147 | RMLsHISEAFFRKNWLRLTW |
| 7148 | RMLsHISEVFFRKNWLRLTW |
| 7149 | RMLsLRDQRLFFRKNWLRLTW |
| 7150 | RMLsPLSSAFFRKNWLRLTW |
| 7151 | RMLsPLSSVFFRKNWLRLTW |
| 7152 | RMLsPSMASKFFRKNWLRLTW |
| 7153 | RMLsSGVSEIFFRKNWLRLTW |
| 7154 | RMLsSGVSEVFFRKNWLRLTW |
| 7155 | RMLsVILIKFFRKNWLRLTW |
| 7156 | RMPsFLKKNKFFRKNWLRLTW |
| 7157 | RMPsSTLKKFFRKNWLRLTW |
| 7158 | RMPsSTLKRFFRKNWLRLTW |
| 7159 | RMQsTSERLFFRKNWLRLTW |
| 7160 | RMQsTSERVFFRKNWLRLTW |
| 7161 | RMRQsPLATKFFRKNWLRLTW |
| 7162 | RMRQsPLATRFFRKNWLRLTW |
| 7163 | RMRRsPLLKFFRKNWLRLTW |
| 7164 | RMRsAGAAQKFFRKNWLRLTW |
| 7165 | RMRsLSSLREKFFRKNWLRLTW |
| 7166 | RMRsPPPVSKFFRKNWLRLTW |
| 7167 | RMRTsPITRKFFRKNWLRLTW |
| 7168 | RMRTsPITRRFFRKNWLRLTW |
| 7169 | RMSsLIRHKFFRKNWLRLTW |
| 7170 | RMSsPISKKFFRKNWLRLTW |
| 7171 | RMSsPISKRFFRKNWLRLTW |
| 7172 | RMSsPLHFVFFRKNWLRLTW |
| 7173 | RMSsPVLHKFFRKNWLRLTW |
| 7174 | RMSsRYSQKFFRKNWLRLTW |
| 7175 | RMSsVKLISKFFRKNWLRLTW |
| 7176 | RMSsVKLISYFFRKNWLRLTW |
| 7177 | RMVsLSMRKFFRKNWLRLTW |
| 7178 | RMVsLSMRYFFRKNWLRLTW |
| 7179 | RMYKsPLRHFFRKNWLRLTW |
| 7180 | RMYKsPLRKFFRKNWLRLTW |
| 7181 | RMYQyIQSKFFRKNWLRLTW |
| 7182 | RMYQyIQSRFFRKNWLRLTW |
| 7183 | RMYQyLQSRFFFRKNWLRLTW |
| 7184 | RMYQyLQSRFKFFRKNWLRLTW |
| 7185 | RMYQyLQSRFYFFRKNWLRLTW |
| 7186 | RMYQyLQSRKFFRKNWLRLTW |
| 7187 | RMYsFDDVLFFRKNWLRLTW |
| 7188 | RMYsGSRsKFFRKNWLRLTW |
| 7189 | RMYsGSRsRFFRKNWLRLTW |
| 7190 | RMYsKSRDHFFRKNWLRLTW |
| 7191 | RMYsKSRDKFFRKNWLRLTW |
| 7192 | RMYsKSRDYFFRKNWLRLTW |
| 7193 | RMYsPDHRQKFFRKNWLRLTW |
| 7194 | RMYsPERSKFFRKNWLRLTW |
| 7195 | RMYsPIIYQAFFRKNWLRLTW |
| 7196 | RMYsPIPPSLFFRKNWLRLTW |
| 7197 | RMYsPRNSKFFRKNWLRLTW |
| 7198 | RMYsPYNHKFFRKNWLRLTW |
| 7199 | RMYsPYNHRFFRKNWLRLTW |
| 7200 | RMYsYPRQKFFRKNWLRLTW |
| 7201 | RMYVTTSTRTYsLGFFRKNWLRLTW |
| 7202 | RMYVTTSTRTYsLKFFRKNWLRLTW |
| 7203 | RMYVTTSTRTYsLYFFRKNWLRLTW |
| 7204 | RNLsSPFIFFFRKNWLRLTW |
| 7205 | RPAFFsPSLFFRKNWLRLTW |
| 7206 | RPAKsMDSFFFRKNWLRLTW |
| 7207 | RPAKsMDSLFFRKNWLRLTW |
| 7208 | RPAKsMDSMFFRKNWLRLTW |
| 7209 | RPAKsMDVFFRKNWLRLTW |
| 7210 | RPAsAGAMFFFRKNWLRLTW |
| 7211 | RPAsAGAmLFFRKNWLRLTW |
| 7212 | RPAsAGAMLFFRKNWLRLTW |
| 7213 | RPAsAGAMMFFRKNWLRLTW |
| 7214 | RPAsAGAMVFFRKNWLRLTW |
| 7215 | RPAsARAQPGFFFRKNWLRLTW |
| 7216 | RPAsARAQPGLFFRKNWLRLTW |
| 7217 | RPAsARAQPGMFFRKNWLRLTW |
| 7218 | RPAsARAQPGVFFRKNWLRLTW |
| 7219 | RPAsEARAPGLFFRKNWLRLTW |
| 7220 | RPAsPAAKFFFRKNWLRLTW |
| 7221 | RPAsPAAKLFFRKNWLRLTW |
| 7222 | RPAsPAAKMFFRKNWLRLTW |
| 7223 | RPAsPAAKVFFRKNWLRLTW |
| 7224 | RPAsPEPELFFRKNWLRLTW |
| 7225 | RPAsPGPSLFFRKNWLRLTW |
| 7226 | RPAsPKRAKIFFRKNWLRLTW |
| 7227 | RPAsPKRAKLFFRKNWLRLTW |
| 7228 | RPAsPKRAKXFFRKNWLRLTW |
| 7229 | RPAsPKRAQIFFRKNWLRLTW |
| 7230 | RPAsPKRAQLFFRKNWLRLTW |
| 7231 | RPAsPKRAQXFFRKNWLRLTW |
| 7232 | RPAsPQRAKIFFRKNWLRLTW |
| 7233 | RPAsPQRAKLFFRKNWLRLTW |
| 7234 | RPAsPQRAKXFFRKNWLRLTW |
| 7235 | RPAsPQRAQIFFRKNWLRLTW |
| 7236 | RPAsPQRAQLFFRKNWLRLTW |
| 7237 | RPAsPQRAQXFFRKNWLRLTW |
| 7238 | RPAsPSLQLFFRKNWLRLTW |
| 7239 | RPAsPSLQLLFFRKNWLRLTW |
| 7240 | RPAsPtAIRRIGSVTSRQTFFRKNWLRLTW |
| 7241 | RPAsRFEVLFFRKNWLRLTW |
| 7242 | RPAsYKKKSMLFFRKNWLRLTW |
| 7243 | RPAtGGPGVAFFRKNWLRLTW |
| 7244 | RPAtGGPGVFFFRKNWLRLTW |
| 7245 | RPAtGGPGVLFFRKNWLRLTW |
| 7246 | RPAtGGPGVMFFRKNWLRLTW |
| 7247 | RPAtGGPGWFFRKNWLRLTW |
| 7248 | RPAtPTSQFFFRKNWLRLTW |
| 7249 | RPAtPTSQLFFRKNWLRLTW |
| 7250 | RPAtPTSQMFFRKNWLRLTW |
| 7251 | RPAtPTSQVFFRKNWLRLTW |
| 7252 | RPDsAHKMLFFRKNWLRLTW |
| 7253 | RPDsPTRPTLFFRKNWLRLTW |
| 7254 | RPDsRLGKTEFFFRKNWLRLTW |
| 7255 | RPDsRLGKTELFFRKNWLRLTW |
| 7256 | RPDsRLGKTEMFFRKNWLRLTW |
| 7257 | RPDsRLGKTEVFFRKNWLRLTW |
| 7258 | RPDVAKRLsLFFRKNWLRLTW |
| 7259 | RPEsDSGLKFFFRKNWLRLTW |
| 7260 | RPEsDSGLKLFFRKNWLRLTW |
| 7261 | RPEsDSGLKMFFRKNWLRLTW |
| 7262 | RPEsDSGLKVFFRKNWLRLTW |
| 7263 | RPEsKDRKFFFRKNWLRLTW |
| 7264 | RPEsKDRKLFFRKNWLRLTW |
| 7265 | RPEsKDRKMFFRKNWLRLTW |
| 7266 | RPEsKDRKVFFRKNWLRLTW |
| 7267 | RPFARsHSFFFRKNWLRLTW |
| 7268 | RPFARSHsFFFRKNWLRLTW |
| 7269 | RPFHGISTVsLFFRKNWLRLTW |
| 7270 | RPFsPREAFFFRKNWLRLTW |
| 7271 | RPFsPREALFFRKNWLRLTW |
| 7272 | RPFsPREAMFFRKNWLRLTW |
| 7273 | RPFsPREAVFFRKNWLRLTW |
| 7274 | RPGsLERKFFFRKNWLRLTW |
| 7275 | RPGsLERKLFFRKNWLRLTW |
| 7276 | RPGsLERKMFFRKNWLRLTW |
| 7277 | RPGsLERKVFFRKNWLRLTW |
| 7278 | RPGsRQAGLFFRKNWLRLTW |
| 7279 | RPGsRqAGL FFRKNWLRLTW |
| 7280 | RPHsPEKAFFFRKNWLRLTW |
| 7281 | RPHsPEKALFFRKNWLRLTW |
| 7282 | RPHsPEKAMFFRKNWLRLTW |
| 7283 | RPHsPEKAVFFRKNWLRLTW |
| 7284 | RPHtPTGIYMFFRKNWLRLTW |
| 7285 | RPHtPTPGIYMFFRKNWLRLTW |
| 7286 | RPIsPGLSFFFRKNWLRLTW |
| 7287 | RPIsPGLSLFFRKNWLRLTW |
| 7288 | RPIsPGLSMFFRKNWLRLTW |
| 7289 | RPIsPGLSVFFRKNWLRLTW |
| 7290 | RPIsPGLSYFFRKNWLRLTW |
| 7291 | RPIsPPHTYFFRKNWLRLTW |
| 7292 | RPIsPRIGALFFRKNWLRLTW |
| 7293 | RPItPPRNSAFFRKNWLRLTW |
| 7294 | RPItPPRNSFFFRKNWLRLTW |
| 7295 | RPItPPRNSLFFRKNWLRLTW |
| 7296 | RPItPPRNSMFFRKNWLRLTW |
| 7297 | RPItPPRNSVFFRKNWLRLTW |
| 7298 | RPKLSsPAFFFRKNWLRLTW |
| 7299 | RPKLSsPALFFRKNWLRLTW |
| 7300 | RPKLSsPAMFFRKNWLRLTW |
| 7301 | RPKLSsPAVFFRKNWLRLTW |
| 7302 | RPKPSSsPFFFRKNWLRLTW |
| 7303 | RPKPSSsPLFFRKNWLRLTW |
| 7304 | RPKPSSsPMFFRKNWLRLTW |
| 7305 | RPKPSSsPVFFRKNWLRLTW |
| 7306 | RPKsNIVLFFFRKNWLRLTW |
| 7307 | RPKsNIVLLFFRKNWLRLTW |
| 7308 | RPKsNIVLMFFRKNWLRLTW |
| 7309 | RPKsNIVLVFFRKNWLRLTW |
| 7310 | RPKsPLSKmFFRKNWLRLTW |
| 7311 | RPKsPLSKMFFRKNWLRLTW |
| 7312 | RPKsQVAEFFFRKNWLRLTW |
| 7313 | RPKsQVAELFFRKNWLRLTW |
| 7314 | RPKsQVAEMFFRKNWLRLTW |
| 7315 | RPKsQVAEVFFRKNWLRLTW |
| 7316 | RPKsVDFDSLFFRKNWLRLTW |
| 7317 | RPKtPPWIFFRKNWLRLTW |
| 7318 | RPLsLLLALFFRKNWLRLTW |
| 7319 | RPLsPGGAFFFRKNWLRLTW |
| 7320 | RPLsPGGALFFRKNWLRLTW |
| 7321 | RPLsPGGAMFFRKNWLRLTW |
| 7322 | RPLsPGGAVFFRKNWLRLTW |
| 7323 | RPLsPLLFFFRKNWLRLTW |
| 7324 | RPLsPLLLFFRKNWLRLTW |
| 7325 | RPLsPLLMFFRKNWLRLTW |
| 7326 | RPLsPLLVFFRKNWLRLTW |
| 7327 | RPLsWYVLFFRKNWLRLTW |
| 7328 | RPMsESPHMFFRKNWLRLTW |
| 7329 | RPNsPSPTAFFFRKNWLRLTW |
| 7330 | RPNsPSPTALFFRKNWLRLTW |
| 7331 | RPNsPSPTAMFFRKNWLRLTW |
| 7332 | RPNsPSPTAVFFRKNWLRLTW |
| 7333 | RPPIgTQSSLFFRKNWLRLTW |
| 7334 | RPPPPPDtPFFFRKNWLRLTW |
| 7335 | RPPPPPDtPLFFRKNWLRLTW |
| 7336 | RPPPPPDtPMFFRKNWLRLTW |
| 7337 | RPPPPPDtPPFFRKNWLRLTW |
| 7338 | RPPPPPDtPVFFRKNWLRLTW |
| 7339 | RPPsPGPVFFFRKNWLRLTW |
| 7340 | RPPsPGPVLFFRKNWLRLTW |
| 7341 | RPPsPGPVMFFRKNWLRLTW |
| 7342 | RPPsPGPWFFRKNWLRLTW |
| 7343 | RPPsPSSRFFFRKNWLRLTW |
| 7344 | RPPsPSSRLFFRKNWLRLTW |
| 7345 | RPPsPSSRMFFRKNWLRLTW |
| 7346 | RPPsPSSRVFFRKNWLRLTW |
| 7347 | RPPsSEFLDFFFRKNWLRLTW |
| 7348 | RPPsSEFLDLFFRKNWLRLTW |
| 7349 | RPPsSEFLDMFFRKNWLRLTW |
| 7350 | RPPsSEFLDVFFRKNWLRLTW |
| 7351 | RPQKTQsIIFFRKNWLRLTW |
| 7352 | RPQRAtSNVFFFRKNWLRLTW |
| 7353 | RPQRATsNVFFFRKNWLRLTW |
| 7354 | RPQRAtSNVLFFRKNWLRLTW |
| 7355 | RPQRATsNVLFFRKNWLRLTW |
| 7356 | RPQRAtSNVMFFRKNWLRLTW |
| 7357 | RPQRATsNVMFFRKNWLRLTW |
| 7358 | RPQRAtSNWFFRKNWLRLTW |
| 7359 | RPQRATsNWFFRKNWLRLTW |
| 7360 | RPR(sLss)PTVTLFFRKNWLRLTW |
| 7361 | RPR(sLss)PTVTVFFRKNWLRLTW |
| 7362 | RPRAAtWFFRKNWLRLTW |
| 7363 | RPRAAtWAFFRKNWLRLTW |
| 7364 | RPRAAtWFFRKNWLRLTW |
| 7365 | RPRAAtWAFFRKNWLRLTW |
| 7366 | RPRANsGGVDFFFRKNWLRLTW |
| 7367 | RPRANsGGVDLFFRKNWLRLTW |
| 7368 | RPRANsGGVDMFFRKNWLRLTW |
| 7369 | RPRANsGGVDVFFRKNWLRLTW |
| 7370 | RPRARsVDALFFRKNWLRLTW |
| 7371 | RPRDtRRISLFFRKNWLRLTW |
| 7372 | RPRGsESLLFFRKNWLRLTW |
| 7373 | RPRGsQSLFFFRKNWLRLTW |
| 7374 | RPRGsQSLLFFRKNWLRLTW |
| 7375 | RPRGsQSLMFFRKNWLRLTW |
| 7376 | RPRGsQSLVFFRKNWLRLTW |
| 7377 | RPRIPsPIGFFFRKNWLRLTW |
| 7378 | RPRLSsTNSSRFFFRKNWLRLTW |
| 7379 | RPRPAsSPALFFRKNWLRLTW |
| 7380 | RPRPHsAPSFFFRKNWLRLTW |
| 7381 | RPRPHsAPSLFFRKNWLRLTW |
| 7382 | RPRPHsAPSMFFRKNWLRLTW |
| 7383 | RPRPHsAPSVFFRKNWLRLTW |
| 7384 | RPRPSsAHVGLFFRKNWLRLTW |
| 7385 | RPRPsSVLFFRKNWLRLTW |
| 7386 | RPRPsSVLRTLFFRKNWLRLTW |
| 7387 | RPRPVsPSSFFFRKNWLRLTW |
| 7388 | RPRPVsPSSLFFRKNWLRLTW |
| 7389 | RPRPVsPSSLLFFRKNWLRLTW |
| 7390 | RPRPVsPSSMFFRKNWLRLTW |
| 7391 | RPRPVsPSSVFFRKNWLRLTW |
| 7392 | RPRRsSTQFFFRKNWLRLTW |
| 7393 | RPRRsSTQLFFRKNWLRLTW |
| 7394 | RPRRsSTQMFFRKNWLRLTW |
| 7395 | RPRRsSTQVFFRKNWLRLTW |
| 7396 | RPRsAVEQLFFRKNWLRLTW |
| 7397 | RPRsAVLFFFRKNWLRLTW |
| 7398 | RPRsAVLLFFRKNWLRLTW |
| 7399 | RPRsAVLMFFRKNWLRLTW |
| 7400 | RPRsAVLVFFRKNWLRLTW |
| 7401 | RPRSGsTGSSLFFRKNWLRLTW |
| 7402 | RPRsISVEEFFFRKNWLRLTW |
| 7403 | RPRsISVEELFFRKNWLRLTW |
| 7404 | RPRsISVEEMFFRKNWLRLTW |
| 7405 | RPRsISVEEVFFRKNWLRLTW |
| 7406 | RPRsLEVTFFFRKNWLRLTW |
| 7407 | RPRsLEVTIFFRKNWLRLTW |
| 7408 | RPRsLEVTLFFRKNWLRLTW |
| 7409 | RPRsLEVTMFFRKNWLRLTW |
| 7410 | RPRsLEVTVFFRKNWLRLTW |
| 7411 | RPRSLsSPTVFFRKNWLRLTW |
| 7412 | RPRSLsSPTVTFFFRKNWLRLTW |
| 7413 | RPRSLsSPTVTLFFRKNWLRLTW |
| 7414 | RPRSLsSPTVTMFFRKNWLRLTW |
| 7415 | RPRSLsSPTVTVFFRKNWLRLTW |
| 7416 | RPRsMTVSAFFRKNWLRLTW |
| 7417 | RPRsMVRSFFFRKNWLRLTW |
| 7418 | RPRsPAARFFFRKNWLRLTW |
| 7419 | RPRsPAARLFFRKNWLRLTW |
| 7420 | RPRsPAARMFFRKNWLRLTW |
| 7421 | RPRsPAARVFFRKNWLRLTW |
| 7422 | RPRsPGSNSKVFFRKNWLRLTW |
| 7423 | RPRsPNMQDLFFRKNWLRLTW |
| 7424 | RPRsPPGGPFFRKNWLRLTW |
| 7425 | RPRsPPPRAFFFRKNWLRLTW |
| 7426 | RPRsPPPRALFFRKNWLRLTW |
| 7427 | RPRsPPPRAMFFRKNWLRLTW |
| 7428 | RPRsPPPRAPFFRKNWLRLTW |
| 7429 | RPRsPPPRAVFFRKNWLRLTW |
| 7430 | RPRsPPSSPFFRKNWLRLTW |
| 7431 | RPRsPRENSFFFRKNWLRLTW |
| 7432 | RPRsPRENSIFFRKNWLRLTW |
| 7433 | RPRsPRENSLFFRKNWLRLTW |
| 7434 | RPRsPRENSMFFRKNWLRLTW |
| 7435 | RPRsPRENSVFFRKNWLRLTW |
| 7436 | RPRsPRPPPFFRKNWLRLTW |
| 7437 | RPRsPRQNLIFFRKNWLRLTW |
| 7438 | RPRsPRQNSFFFRKNWLRLTW |
| 7439 | RPRsPRQNSIFFRKNWLRLTW |
| 7440 | RPRsPRQNSMFFRKNWLRLTW |
| 7441 | RPRsPRQNSVFFRKNWLRLTW |
| 7442 | RPRsPSPIFFFRKNWLRLTW |
| 7443 | RPRsPSPILFFRKNWLRLTW |
| 7444 | RPRsPSPIMFFRKNWLRLTW |
| 7445 | RPRsPSPISFFRKNWLRLTW |
| 7446 | RPRSPsPISFFRKNWLRLTW |
| 7447 | RPRsPSPIVFFRKNWLRLTW |
| 7448 | RPRsPTGFFFRKNWLRLTW |
| 7449 | RPRsPTGLFFRKNWLRLTW |
| 7450 | RPRsPTGMFFRKNWLRLTW |
| 7451 | RPRsPTGPFFRKNWLRLTW |
| 7452 | RPRsPTGPsNSFFFRKNWLRLTW |
| 7453 | RPRsPTGPSNSFFFRKNWLRLTW |
| 7454 | RPRsPTGPSNSFLFFRKNWLRLTW |
| 7455 | RPRsPTGPsNSLFFRKNWLRLTW |
| 7456 | RPRsPTGPsNSMFFRKNWLRLTW |
| 7457 | RPRsPTGPsNSVFFRKNWLRLTW |
| 7458 | RPRsPTGVFFRKNWLRLTW |
| 7459 | RPRsPTRSFFFRKNWLRLTW |
| 7460 | RPRsPTRSLFFRKNWLRLTW |
| 7461 | RPRsPTRSMFFRKNWLRLTW |
| 7462 | RPRsPTRSVFFRKNWLRLTW |
| 7463 | RPRsPWGKLFFRKNWLRLTW |
| 7464 | RPRsQYNTKLFFRKNWLRLTW |
| 7465 | RPRSTsQSIVSLFFRKNWLRLTW |
| 7466 | RPRtPLRSLFFRKNWLRLTW |
| 7467 | RPSGRREsFFFRKNWLRLTW |
| 7468 | RPSGRREsLFFRKNWLRLTW |
| 7469 | RPSGRREsMFFRKNWLRLTW |
| 7470 | RPSGRREsVFFRKNWLRLTW |
| 7471 | RPsNPQLFFRKNWLRLTW |
| 7472 | RPSRSsPGFFFRKNWLRLTW |
| 7473 | RPSRSsPGLFFRKNWLRLTW |
| 7474 | RPSRSsPGMFFRKNWLRLTW |
| 7475 | RPSRSsPGVFFRKNWLRLTW |
| 7476 | RPSsGFYELFFRKNWLRLTW |
| 7477 | RPSsLDAEIDSFFFRKNWLRLTW |
| 7478 | RPSsLDAEIDSLFFRKNWLRLTW |
| 7479 | RPSsLDAEIDSMFFRKNWLRLTW |
| 7480 | RPSsLDAEIDSVFFRKNWLRLTW |
| 7481 | RPSsLPDFFFRKNWLRLTW |
| 7482 | RPSsLPDLFFRKNWLRLTW |
| 7483 | RPSsLPDMFFRKNWLRLTW |
| 7484 | RPSsLPDVFFRKNWLRLTW |
| 7485 | RPsSPALYFFFRKNWLRLTW |
| 7486 | RPSsPALYFFFRKNWLRLTW |
| 7487 | RPsSPALYLFFRKNWLRLTW |
| 7488 | RPsSPALYMFFRKNWLRLTW |
| 7489 | RPsSPALYVFFRKNWLRLTW |
| 7490 | RPStPKSDSEFFFRKNWLRLTW |
| 7491 | RPStPKSDSELFFRKNWLRLTW |
| 7492 | RPStPKSDSEMFFRKNWLRLTW |
| 7493 | RPStPKSDSEVFFRKNWLRLTW |
| 7494 | RPTKIGRRsLFFRKNWLRLTW |
| 7495 | RPTsFADELFFRKNWLRLTW |
| 7496 | RPTsPIQIMFFRKNWLRLTW |
| 7497 | RPTsRLNRFFFRKNWLRLTW |
| 7498 | RPTsRLNRLFFRKNWLRLTW |
| 7499 | RPTsRLNRMFFRKNWLRLTW |
| 7500 | RPTsRLNRVFFRKNWLRLTW |
| 7501 | RPVsPFQEFFFRKNWLRLTW |
| 7502 | RPVsPFQELFFRKNWLRLTW |
| 7503 | RPVsPFQEMFFRKNWLRLTW |
| 7504 | RPVsPFQEVFFRKNWLRLTW |
| 7505 | RPVsPGKDFFFRKNWLRLTW |
| 7506 | RPVsPGKDIFFRKNWLRLTW |
| 7507 | RPVsPGKDLFFRKNWLRLTW |
| 7508 | RPVsPGKDMFFRKNWLRLTW |
| 7509 | RPVsPGKDVFFRKNWLRLTW |
| 7510 | RPVSPsSLLFFRKNWLRLTW |
| 7511 | RPVsTDFAQYFFRKNWLRLTW |
| 7512 | RPVtPVSDFFFRKNWLRLTW |
| 7513 | RPVtPVSDLFFRKNWLRLTW |
| 7514 | RPVtPVSDMFFRKNWLRLTW |
| 7515 | RPVtPVSDVFFRKNWLRLTW |
| 7516 | RPWsNSRGLFFRKNWLRLTW |
| 7517 | RPWsPAVSAFFRKNWLRLTW |
| 7518 | RPWsPAVSFFFRKNWLRLTW |
| 7519 | RPWsPAVSLFFRKNWLRLTW |
| 7520 | RPWsPAVSMFFRKNWLRLTW |
| 7521 | RPWsPAVSVFFRKNWLRLTW |
| 7522 | RPYsPPFFSFFFRKNWLRLTW |
| 7523 | RPYsPPFFSLFFRKNWLRLTW |
| 7524 | RPYsPPFFSMFFRKNWLRLTW |
| 7525 | RPYsPPFFSVFFRKNWLRLTW |
| 7526 | RPYSPsQALFFRKNWLRLTW |
| 7527 | RPYsPSQYALFFRKNWLRLTW |
| 7528 | RPYSPsQYALFFRKNWLRLTW |
| 7529 | RPYsQVNVLFFRKNWLRLTW |
| 7530 | RQAsIELPSMFFRKNWLRLTW |
| 7531 | RQAsIELPSMAVFFRKNWLRLTW |
| 7532 | RQAsIELPSVFFRKNWLRLTW |
| 7533 | RQAsLSISVFFRKNWLRLTW |
| 7534 | RQAsPLVHKFFRKNWLRLTW |
| 7535 | RQAsPLVHRFFRKNWLRLTW |
| 7536 | RQAsPLVHYFFRKNWLRLTW |
| 7537 | RQDsTPGKVFLFFRKNWLRLTW |
| 7538 | RQDStPGKVFLFFRKNWLRLTW |
| 7539 | RQDsTPGKVFVFFRKNWLRLTW |
| 7540 | RQIsFKAEVFFRKNWLRLTW |
| 7541 | RQIsQDVKLFFRKNWLRLTW |
| 7542 | RQIsQDVKVFFRKNWLRLTW |
| 7543 | RQKsPLFQFFFRKNWLRLTW |
| 7544 | RQLsALHRAFFRKNWLRLTW |
| 7545 | RQLsLEGSGLGVFFRKNWLRLTW |
| 7546 | RQLsSGVSEIFFRKNWLRLTW |
| 7547 | RQLsSGVSEVFFRKNWLRLTW |
| 7548 | RQSsSRFNLFFRKNWLRLTW |
| 7549 | RRAsFAKSFFFRKNWLRLTW |
| 7550 | RRAsFAKSKFFRKNWLRLTW |
| 7551 | RRAsFAKSLFFRKNWLRLTW |
| 7552 | RRAsFAKSMFFRKNWLRLTW |
| 7553 | RRAsFAKSRFFRKNWLRLTW |
| 7554 | RRAsIITKYFFRKNWLRLTW |
| 7555 | RRAsLSEIGFFFRKNWLRLTW |
| 7556 | RRAsLSEIGKFFRKNWLRLTW |
| 7557 | RRAsLSEIGYFFRKNWLRLTW |
| 7558 | RRAsQEANLFFRKNWLRLTW |
| 7559 | RRASsPFRFFFRKNWLRLTW |
| 7560 | RRASsPFRKFFRKNWLRLTW |
| 7561 | RRASsPFRLFFRKNWLRLTW |
| 7562 | RRASsPFRMFFRKNWLRLTW |
| 7563 | RRASsPFRRFFRKNWLRLTW |
| 7564 | RRAsVFVKFFFRKNWLRLTW |
| 7565 | RRAsVFVKKFFRKNWLRLTW |
| 7566 | RRAsVFVKLFFRKNWLRLTW |
| 7567 | RRAsVFVKMFFRKNWLRLTW |
| 7568 | RRAsVFVKRFFRKNWLRLTW |
| 7569 | RRDsIVAEFFFRKNWLRLTW |
| 7570 | RRDsIVAEKFFRKNWLRLTW |
| 7571 | RRDsIVAELFFRKNWLRLTW |
| 7572 | RRDsIVAERFFRKNWLRLTW |
| 7573 | RRDsIVAEYFFRKNWLRLTW |
| 7574 | RRDsLQKPGLFFRKNWLRLTW |
| 7575 | RRFsFEVTLFFRKNWLRLTW |
| 7576 | RRFsFKFFFRKNWLRLTW |
| 7577 | RRFsFKKFFRKNWLRLTW |
| 7578 | RRFsFKKSFFFRKNWLRLTW |
| 7579 | RRFsFKKSKFFRKNWLRLTW |
| 7580 | RRFsFKKSLFFRKNWLRLTW |
| 7581 | RRFsFKKSMFFRKNWLRLTW |
| 7582 | RRFsFKKSRFFRKNWLRLTW |
| 7583 | RRFsFKLFFRKNWLRLTW |
| 7584 | RRFsFKMFFRKNWLRLTW |
| 7585 | RRFsFKRFFRKNWLRLTW |
| 7586 | RRFsGTAVYFFRKNWLRLTW |
| 7587 | RRFsGTVRFFFRKNWLRLTW |
| 7588 | RRFsGTVRKFFRKNWLRLTW |
| 7589 | RRFsGTVRLFFRKNWLRLTW |
| 7590 | RRFsGTVRMFFRKNWLRLTW |
| 7591 | RRFsGTVRRFFRKNWLRLTW |
| 7592 | RRFsIATLRFFRKNWLRLTW |
| 7593 | RRFsLTTLRFFRKNWLRLTW |
| 7594 | RRFsPDDKYSFFFRKNWLRLTW |
| 7595 | RRFsPDDKYSKFFRKNWLRLTW |
| 7596 | RRFsPDDKYSLFFRKNWLRLTW |
| 7597 | RRFsPDDKYSMFFRKNWLRLTW |
| 7598 | RRFsPPRRFFFRKNWLRLTW |
| 7599 | RRFsPPRRKFFRKNWLRLTW |
| 7600 | RRFsPPRRLFFRKNWLRLTW |
| 7601 | RRFsPPRRmFFRKNWLRLTW |
| 7602 | RRFsPPRRMFFRKNWLRLTW |
| 7603 | RRFsPPRRRFFRKNWLRLTW |
| 7604 | RRFsPPRRYFFRKNWLRLTW |
| 7605 | RRFsRLENRYFFRKNWLRLTW |
| 7606 | RRFsRSDELFFRKNWLRLTW |
| 7607 | RRFsRsPIFFFRKNWLRLTW |
| 7608 | RRFsRSPIFFFRKNWLRLTW |
| 7609 | RRFsRsPIKFFRKNWLRLTW |
| 7610 | RRFsRSPIKFFRKNWLRLTW |
| 7611 | RRFsRsPILFFRKNWLRLTW |
| 7612 | RRFsRSPILFFRKNWLRLTW |
| 7613 | RRFsRSPIMFFRKNWLRLTW |
| 7614 | RRFsRsPIRFFRKNWLRLTW |
| 7615 | RRFsRSPIRFFRKNWLRLTW |
| 7616 | RRFSRsPIRFFRKNWLRLTW |
| 7617 | RRFsRsPIRFFFRKNWLRLTW |
| 7618 | RRFsRSPIRFFFRKNWLRLTW |
| 7619 | RRFsRsPIRKFFRKNWLRLTW |
| 7620 | RRFsRSPIRKFFRKNWLRLTW |
| 7621 | RRFsRsPIRLFFRKNWLRLTW |
| 7622 | RRFsRSPIRLFFRKNWLRLTW |
| 7623 | RRFsRsPIRRFFRKNWLRLTW |
| 7624 | RRFsRSPIRRFFRKNWLRLTW |
| 7625 | RRFsRsPIRYFFRKNWLRLTW |
| 7626 | RRFsRSPIRYFFRKNWLRLTW |
| 7627 | RRFsRsPIYFFRKNWLRLTW |
| 7628 | RRFsRSPIYFFRKNWLRLTW |
| 7629 | RRFsRSPKFFRKNWLRLTW |
| 7630 | RRFSsPPRRMFFRKNWLRLTW |
| 7631 | RRFsVSTLRFFRKNWLRLTW |
| 7632 | RRFsVTTMRFFRKNWLRLTW |
| 7633 | RRFtPPSPAFFFRKNWLRLTW |
| 7634 | RRFtPPSPAKFFRKNWLRLTW |
| 7635 | RRFtPPSPARFFRKNWLRLTW |
| 7636 | RRFtPPSPAYFFRKNWLRLTW |
| 7637 | RRGsFEVTLFFRKNWLRLTW |
| 7638 | RRHsASNLHALFFRKNWLRLTW |
| 7639 | RRIDIsPSTFFFRKNWLRLTW |
| 7640 | RRIDIsPSTKFFRKNWLRLTW |
| 7641 | RRIDIsPSTLRFFRKNWLRLTW |
| 7642 | RRIDIsPSTLRKFFRKNWLRLTW |
| 7643 | RRIDIsPSTRFFRKNWLRLTW |
| 7644 | RRIDIsPSTYFFRKNWLRLTW |
| 7645 | RRIsDPEVFFFRKNWLRLTW |
| 7646 | RRIsDPQVFFFRKNWLRLTW |
| 7647 | RRIsGVDRFFFRKNWLRLTW |
| 7648 | RRIsGVDRKFFRKNWLRLTW |
| 7649 | RRIsGVDRLFFRKNWLRLTW |
| 7650 | RRIsGVDRMFFRKNWLRLTW |
| 7651 | RRIsGVDRRFFRKNWLRLTW |
| 7652 | RRIsGVDRYFFRKNWLRLTW |
| 7653 | RRIsGVDRYFFFRKNWLRLTW |
| 7654 | RRIsGVDRYKFFRKNWLRLTW |
| 7655 | RRIsGVDRYLFFRKNWLRLTW |
| 7656 | RRIsGVDRYRFFRKNWLRLTW |
| 7657 | RRISGVDRYYFFRKNWLRLTW |
| 7658 | RRISPAPQRFFRKNWLRLTW |
| 7659 | RRIsQIQQLFFRKNWLRLTW |
| 7660 | RRKsOVAEFFFRKNWLRLTW |
| 7661 | RRKsOVAEKFFRKNWLRLTW |
| 7662 | RRKsPPPSFFFRKNWLRLTW |
| 7663 | RRKsPPPSKFFRKNWLRLTW |
| 7664 | RRKsPPPSLFFRKNWLRLTW |
| 7665 | RRKsPPPSMFFRKNWLRLTW |
| 7666 | RRKsPPPSRFFRKNWLRLTW |
| 7667 | RRKsQLDSFFFRKNWLRLTW |
| 7668 | RRKsQLDSKFFRKNWLRLTW |
| 7669 | RRKsQLDSLFFRKNWLRLTW |
| 7670 | RRKsQLDSMFFRKNWLRLTW |
| 7671 | RRKsQLDSRFFRKNWLRLTW |
| 7672 | RRKsQLDSYFFRKNWLRLTW |
| 7673 | RRKsQVAEFFFRKNWLRLTW |
| 7674 | RRKsQVAEKFFRKNWLRLTW |
| 7675 | RRKsQVAELFFRKNWLRLTW |
| 7676 | RRKsQVAEMFFRKNWLRLTW |
| 7677 | RRKsQVAERFFRKNWLRLTW |
| 7678 | RRKsQVAEVFFRKNWLRLTW |
| 7679 | RRKsQVAEYFFRKNWLRLTW |
| 7680 | RRLGsPHRFFFRKNWLRLTW |
| 7681 | RRLGsPHRKFFRKNWLRLTW |
| 7682 | RRLGsPHRLFFRKNWLRLTW |
| 7683 | RRLGsPHRMFFRKNWLRLTW |
| 7684 | RRLGsPHRRFFRKNWLRLTW |
| 7685 | RRLsADIRFFFRKNWLRLTW |
| 7686 | RRLsADIRKFFRKNWLRLTW |
| 7687 | RRLsADIRLFFRKNWLRLTW |
| 7688 | RRLsADIRMFFRKNWLRLTW |
| 7689 | RRLsADIRRFFRKNWLRLTW |
| 7690 | RRLsADIRYFFRKNWLRLTW |
| 7691 | RRLsDSPVFFFRKNWLRLTW |
| 7692 | RRLsELLRYFFRKNWLRLTW |
| 7693 | RRLsERETRFFRKNWLRLTW |
| 7694 | RRLsESSALFFRKNWLRLTW |
| 7695 | RRLsFLVSFFFRKNWLRLTW |
| 7696 | RRLsFLVSKFFRKNWLRLTW |
| 7697 | RRLsFLVSLFFRKNWLRLTW |
| 7698 | RRLsFLVSMFFRKNWLRLTW |
| 7699 | RRLsFLVSRFFRKNWLRLTW |
| 7700 | RRLsFLVSYFFRKNWLRLTW |
| 7701 | RRLsGGSHSFFFRKNWLRLTW |
| 7702 | RRLsGGSHSKFFRKNWLRLTW |
| 7703 | RRLsGGSHSLFFRKNWLRLTW |
| 7704 | RRLsGGSHSMFFRKNWLRLTW |
| 7705 | RRLsGGSHSRFFRKNWLRLTW |
| 7706 | RRLsGGSHSYFFRKNWLRLTW |
| 7707 | RRLsGPLHTFFFRKNWLRLTW |
| 7708 | RRLsGPLHTKFFRKNWLRLTW |
| 7709 | RRLsGPLHTLFFRKNWLRLTW |
| 7710 | RRLsGPLHTMFFRKNWLRLTW |
| 7711 | RRLsGPLHTRFFRKNWLRLTW |
| 7712 | RRLsGPLHTVFFRKNWLRLTW |
| 7713 | RRLsGPLHTYFFRKNWLRLTW |
| 7714 | RRLsLFLNVFFRKNWLRLTW |
| 7715 | RRLsNLPTFFFRKNWLRLTW |
| 7716 | RRLsNLPTKFFRKNWLRLTW |
| 7717 | RRLsNLPTRFFRKNWLRLTW |
| 7718 | RRLsNLPTVFFRKNWLRLTW |
| 7719 | RRLsNLPTYFFRKNWLRLTW |
| 7720 | RRLsPAPOFFFRKNWLRLTW |
| 7721 | RRLsPAPQKFFRKNWLRLTW |
| 7722 | RRLsPAPQLFFRKNWLRLTW |
| 7723 | RRLsPAPQMFFRKNWLRLTW |
| 7724 | RRLsPKASQVFFFRKNWLRLTW |
| 7725 | RRLsPKASQVKFFRKNWLRLTW |
| 7726 | RRLsPKASQVLFFRKNWLRLTW |
| 7727 | RRLsPKASQVMFFRKNWLRLTW |
| 7728 | RRLsPKASQVRFFRKNWLRLTW |
| 7729 | RRLsPVPVPFFFRKNWLRLTW |
| 7730 | RRLsPVPVPKFFRKNWLRLTW |
| 7731 | RRLsPVPVPLFFRKNWLRLTW |
| 7732 | RRLsPVPVPMFFRKNWLRLTW |
| 7733 | RRLsPVPVPRFFRKNWLRLTW |
| 7734 | RRLsRELOKFFRKNWLRLTW |
| 7735 | RRLsRELQFFFRKNWLRLTW |
| 7736 | RRLsRELQLFFRKNWLRLTW |
| 7737 | RRLsRELQMFFRKNWLRLTW |
| 7738 | RRLsRELQRFFRKNWLRLTW |
| 7739 | RRLsRKLSLFFRKNWLRLTW |
| 7740 | RRLsVERIFFFRKNWLRLTW |
| 7741 | RRLsVERIKFFRKNWLRLTW |
| 7742 | RRLsVERIMFFRKNWLRLTW |
| 7743 | RRLsVERIRFFRKNWLRLTW |
| 7744 | RRLsYVLFIFFRKNWLRLTW |
| 7745 | RRLTHLsFFFRKNWLRLTW |
| 7746 | RRLTHLsKFFRKNWLRLTW |
| 7747 | RRLTHLsLFFRKNWLRLTW |
| 7748 | RRLTHLsMFFRKNWLRLTW |
| 7749 | RRLTHLsRFFRKNWLRLTW |
| 7750 | RRMsFQKPFFRKNWLRLTW |
| 7751 | RRMsLLSVFFFRKNWLRLTW |
| 7752 | RRMsLLSVKFFRKNWLRLTW |
| 7753 | RRMsLLSVLFFRKNWLRLTW |
| 7754 | RRMsLLSVMFFRKNWLRLTW |
| 7755 | RRMsLLSVRFFRKNWLRLTW |
| 7756 | RRmsLLSWFFRKNWLRLTW |
| 7757 | RRMsLLSWFFRKNWLRLTW |
| 7758 | RRMsLLSVYFFRKNWLRLTW |
| 7759 | RRMsLLSWFFRKNWLRLTW |
| 7760 | RRMsLSVMFFRKNWLRLTW |
| 7761 | RRMsPIKPLFFRKNWLRLTW |
| 7762 | RRMsPKAORFFRKNWLRLTW |
| 7763 | RRMsPKAQFFFRKNWLRLTW |
| 7764 | RRMsPKAQKFFRKNWLRLTW |
| 7765 | RRMsPKAQLFFRKNWLRLTW |
| 7766 | RRMsPKAQMFFRKNWLRLTW |
| 7767 | RRMsPKPFFFRKNWLRLTW |
| 7768 | RRMsPKPKFFRKNWLRLTW |
| 7769 | RRMsPKPMFFRKNWLRLTW |
| 7770 | RRMsPKPRFFRKNWLRLTW |
| 7771 | RRNsAPVSVFFRKNWLRLTW |
| 7772 | RRNsINRNFFFRKNWLRLTW |
| 7773 | RRNsNPVIAEFFFRKNWLRLTW |
| 7774 | RRNsNPVIAEKFFRKNWLRLTW |
| 7775 | RRNsNPVIAELFFRKNWLRLTW |
| 7776 | RRNsNPVIAEMFFRKNWLRLTW |
| 7777 | RRNsNPVIAERFFRKNWLRLTW |
| 7778 | RRNsSERTFFFRKNWLRLTW |
| 7779 | RRNsSERTKFFRKNWLRLTW |
| 7780 | RRNsSERTLFFRKNWLRLTW |
| 7781 | RRNsSERTMFFRKNWLRLTW |
| 7782 | RRNsSERTRFFRKNWLRLTW |
| 7783 | RRNsSERTYFFRKNWLRLTW |
| 7784 | RRNsSIVGFFFRKNWLRLTW |
| 7785 | RRNsSIVGKFFRKNWLRLTW |
| 7786 | RRNsSIVGLFFRKNWLRLTW |
| 7787 | RRNsSIVGMFFRKNWLRLTW |
| 7788 | RRNsSIVGRFFRKNWLRLTW |
| 7789 | RRNsSIVGYFFRKNWLRLTW |
| 7790 | RRNsVFQQGFFFRKNWLRLTW |
| 7791 | RRNsVFQQGKFFRKNWLRLTW |
| 7792 | RRNsVFQQGLFFRKNWLRLTW |
| 7793 | RRNsVFQQGMFFRKNWLRLTW |
| 7794 | RRNsVFQQGRFFRKNWLRLTW |
| 7795 | RRNsVFQQGYFFRKNWLRLTW |
| 7796 | RRPsIAPVLFFRKNWLRLTW |
| 7797 | RRPsLLSEFFFRKNWLRLTW |
| 7798 | RRPsLVHGFFFRKNWLRLTW |
| 7799 | RRPsLVHGKFFRKNWLRLTW |
| 7800 | RRPsLVHGLFFRKNWLRLTW |
| 7801 | RRPsLVHGMFFRKNWLRLTW |
| 7802 | RRPsLVHGRFFRKNWLRLTW |
| 7803 | RRPsLVHGYFFRKNWLRLTW |
| 7804 | RRPsVFERFFFRKNWLRLTW |
| 7805 | RRPsVFERKFFRKNWLRLTW |
| 7806 | RRPsVFERLFFRKNWLRLTW |
| 7807 | RRPsVFERMFFRKNWLRLTW |
| 7808 | RRPsVFERRFFRKNWLRLTW |
| 7809 | RRPsVFERYFFRKNWLRLTW |
| 7810 | RRPsYRKIFFFRKNWLRLTW |
| 7811 | RRPsYRKIKFFRKNWLRLTW |
| 7812 | RRPsYRKILFFRKNWLRLTW |
| 7813 | RRPsYRKIMFFRKNWLRLTW |
| 7814 | RRPsYRKIRFFRKNWLRLTW |
| 7815 | RRPsYRKIYFFRKNWLRLTW |
| 7816 | RRPsYTLGFFFRKNWLRLTW |
| 7817 | RRPsYTLGKFFRKNWLRLTW |
| 7818 | RRPsYTLGLFFRKNWLRLTW |
| 7819 | RRPsYTLGMFFRKNWLRLTW |
| 7820 | RRPsYTLGRFFRKNWLRLTW |
| 7821 | RRPsYTLGVFFRKNWLRLTW |
| 7822 | RRPsYTLGYFFRKNWLRLTW |
| 7823 | RRQsKVEALFFRKNWLRLTW |
| 7824 | RRRsLERLLFFRKNWLRLTW |
| 7825 | RRsFLVSYFFRKNWLRLTW |
| 7826 | RRSFsLEFFRKNWLRLTW |
| 7827 | RRSsFLQFFRKNWLRLTW |
| 7828 | RRssFLQLFFFRKNWLRLTW |
| 7829 | RRssFLQVFFFRKNWLRLTW |
| 7830 | RRSsFLQVFFFRKNWLRLTW |
| 7831 | RRSsFLQVKFFRKNWLRLTW |
| 7832 | RRSsFLQVLFFRKNWLRLTW |
| 7833 | RRssFLQVMFFRKNWLRLTW |
| 7834 | RRSsFLQVMFFRKNWLRLTW |
| 7835 | RRSsFLQVRFFRKNWLRLTW |
| 7836 | RRssFLQWFFRKNWLRLTW |
| 7837 | RRSsFLQVYFFRKNWLRLTW |
| 7838 | RRSsIGLRFFFRKNWLRLTW |
| 7839 | RRSsIGLRKFFRKNWLRLTW |
| 7840 | RRSsIGLRLFFRKNWLRLTW |
| 7841 | RRSsIGLRMFFRKNWLRLTW |
| 7842 | RRSsIGLRRFFRKNWLRLTW |
| 7843 | RRSsIGLRVFFRKNWLRLTW |
| 7844 | RRSsIGLRYFFRKNWLRLTW |
| 7845 | RRsSIQSTFFFRKNWLRLTW |
| 7846 | RRSsIQSTFFFRKNWLRLTW |
| 7847 | RRSsIQSTKFFRKNWLRLTW |
| 7848 | RRSsIQSTLFFRKNWLRLTW |
| 7849 | RRSsIQSTMFFRKNWLRLTW |
| 7850 | RRSsIQSTRFFRKNWLRLTW |
| 7851 | RRSsIQSTYFFRKNWLRLTW |
| 7852 | RRSsLDAEIDSFFFRKNWLRLTW |
| 7853 | RRSsLDAEIDSLFFRKNWLRLTW |
| 7854 | RRSsLDAEIDSMFFRKNWLRLTW |
| 7855 | RRSsLDAEIDSVFFRKNWLRLTW |
| 7856 | RRsSQSWSFFFRKNWLRLTW |
| 7857 | RRSsQSWSFFFRKNWLRLTW |
| 7858 | RRSsQSWSKFFRKNWLRLTW |
| 7859 | RRsSQSWSLFFRKNWLRLTW |
| 7860 | RRSsQSWSLFFRKNWLRLTW |
| 7861 | RRsSQSWSMFFRKNWLRLTW |
| 7862 | RRSsQSWSMFFRKNWLRLTW |
| 7863 | RRSsQSWSRFFRKNWLRLTW |
| 7864 | RRsSQSWSVFFRKNWLRLTW |
| 7865 | RRSsQSWSYFFRKNWLRLTW |
| 7866 | RRSsSVAQVFFRKNWLRLTW |
| 7867 | RRSsTASLVKFFFRKNWLRLTW |
| 7868 | RRSsTASLVKKFFRKNWLRLTW |
| 7869 | RRSsTASLVKLFFRKNWLRLTW |
| 7870 | RRSsTASLVKMFFRKNWLRLTW |
| 7871 | RRSsTASLVKRFFRKNWLRLTW |
| 7872 | RRsSVDLGFFFRKNWLRLTW |
| 7873 | RRSsVDLGFFFRKNWLRLTW |
| 7874 | RRsSVDLGKFFRKNWLRLTW |
| 7875 | RRSsVDLGKFFRKNWLRLTW |
| 7876 | RRsSVDLGLFFRKNWLRLTW |
| 7877 | RRSsVDLGLFFRKNWLRLTW |
| 7878 | RRsSVDLGMFFRKNWLRLTW |
| 7879 | RRSsVDLGMFFRKNWLRLTW |
| 7880 | RRsSVDLGRFFRKNWLRLTW |
| 7881 | RRSsVDLGRFFRKNWLRLTW |
| 7882 | RRsSVDLGYFFRKNWLRLTW |
| 7883 | RRSsVDLGYFFRKNWLRLTW |
| 7884 | RRSsVKVEAFFRKNWLRLTW |
| 7885 | RRSsVKVEFFFRKNWLRLTW |
| 7886 | RRSsVKVEKFFRKNWLRLTW |
| 7887 | RRSsVKVELFFRKNWLRLTW |
| 7888 | RRSsVKVEMFFRKNWLRLTW |
| 7889 | RRSsVKVERFFRKNWLRLTW |
| 7890 | RRSsVKVEYFFRKNWLRLTW |
| 7891 | RRTsPITRFFFRKNWLRLTW |
| 7892 | RRTsPITRKFFRKNWLRLTW |
| 7893 | RRTsPITRLFFRKNWLRLTW |
| 7894 | RRTsPITRMFFRKNWLRLTW |
| 7895 | RRTsPITRRFFRKNWLRLTW |
| 7896 | RRWQRSsFFFRKNWLRLTW |
| 7897 | RRWQRSsKFFRKNWLRLTW |
| 7898 | RRWQRSsLFFRKNWLRLTW |
| 7899 | RRWQRSsMFFRKNWLRLTW |
| 7900 | RRWQRSsRFFRKNWLRLTW |
| 7901 | RRWQRSsYFFRKNWLRLTW |
| 7902 | RRWQRSsLFFRKNWLRLTW |
| 7903 | RRYsGKTEFFFRKNWLRLTW |
| 7904 | RRYsGKTEKFFRKNWLRLTW |
| 7905 | RRYsGKTELFFRKNWLRLTW |
| 7906 | RRYsGKTERFFRKNWLRLTW |
| 7907 | RRYsGKTEYFFRKNWLRLTW |
| 7908 | RRYsGNMEFFFRKNWLRLTW |
| 7909 | RRYsGNMEKFFRKNWLRLTW |
| 7910 | RRYsGNMELFFRKNWLRLTW |
| 7911 | RRYsGNMEMFFRKNWLRLTW |
| 7912 | RRYsGNMERFFRKNWLRLTW |
| 7913 | RRYsKFFDLFFRKNWLRLTW |
| 7914 | RRYsPPIERFFRKNWLRLTW |
| 7915 | RRYsPPIQFFRKNWLRLTW |
| 7916 | RRYsPPIQFFFRKNWLRLTW |
| 7917 | RRYsPPIQKFFRKNWLRLTW |
| 7918 | RRYsPPIQLFFRKNWLRLTW |
| 7919 | RRYsPPIQMFFRKNWLRLTW |
| 7920 | RRYsPPIQRFFRKNWLRLTW |
| 7921 | RRYsPPIQYFFRKNWLRLTW |
| 7922 | RRYsRsPYSFFFRKNWLRLTW |
| 7923 | RRYsRSPYSFFFRKNWLRLTW |
| 7924 | RRYSRsPYSFFFRKNWLRLTW |
| 7925 | RRYsRsPYSKFFRKNWLRLTW |
| 7926 | RRYsRSPYSKFFRKNWLRLTW |
| 7927 | RRYSRsPYSKFFRKNWLRLTW |
| 7928 | RRYsRsPYSLFFRKNWLRLTW |
| 7929 | RRYsRSPYSLFFRKNWLRLTW |
| 7930 | RRYSRsPYSLFFRKNWLRLTW |
| 7931 | RRYsRsPYSMFFRKNWLRLTW |
| 7932 | RRYsRSPYSMFFRKNWLRLTW |
| 7933 | RRYSRsPYSMFFRKNWLRLTW |
| 7934 | RRYsRsPYSRFFRKNWLRLTW |
| 7935 | RRYsRSPYSRFFRKNWLRLTW |
| 7936 | RRYSRsPYSRFFRKNWLRLTW |
| 7937 | RRYtNRWTKFFRKNWLRLTW |
| 7938 | RRYtNRWTLFFRKNWLRLTW |
| 7939 | RRYtNRWTMFFRKNWLRLTW |
| 7940 | RRYtNRWTRFFRKNWLRLTW |
| 7941 | RSAsFSRKVFFRKNWLRLTW |
| 7942 | RSAsPDDDLGSSNFFRKNWLRLTW |
| 7943 | RSAsSATQVHKFFRKNWLRLTW |
| 7944 | RSAsSATQVHYFFRKNWLRLTW |
| 7945 | RSDPSKsPGSLRYFFRKNWLRLTW |
| 7946 | RSDsPKIDLFFRKNWLRLTW |
| 7947 | RSDsPKIDYFFRKNWLRLTW |
| 7948 | RSDsRAQAVFFRKNWLRLTW |
| 7949 | RSDsRAQAYFFRKNWLRLTW |
| 7950 | RSDsVGENLFFRKNWLRLTW |
| 7951 | RSDsVGENYFFRKNWLRLTW |
| 7952 | RSDsYVELFFRKNWLRLTW |
| 7953 | RSDsYVELSQYFFRKNWLRLTW |
| 7954 | RSEPSKsPGSLRYFFRKNWLRLTW |
| 7955 | RSEsKDRKFFFRKNWLRLTW |
| 7956 | RSEsKDRKLFFRKNWLRLTW |
| 7957 | RSEsKDRKMFFRKNWLRLTW |
| 7958 | RSEsKDRKVFFRKNWLRLTW |
| 7959 | RSEsPKIDLFFRKNWLRLTW |
| 7960 | RSEsPKIDYFFRKNWLRLTW |
| 7961 | RSEsPPAELFFRKNWLRLTW |
| 7962 | RSEsRAQAVFFRKNWLRLTW |
| 7963 | RSEsRAQAYFFRKNWLRLTW |
| 7964 | RSEsVGENLFFRKNWLRLTW |
| 7965 | RSEsVGENYFFRKNWLRLTW |
| 7966 | RSEsYVELSQYFFRKNWLRLTW |
| 7967 | RSFsPTMKVFFRKNWLRLTW |
| 7968 | RSGsLERKFFFRKNWLRLTW |
| 7969 | RSGsLERKLFFRKNWLRLTW |
| 7970 | RSGsLERKMFFRKNWLRLTW |
| 7971 | RSGsLERKVFFRKNWLRLTW |
| 7972 | RSHSsPASLFFRKNWLRLTW |
| 7973 | RSIsVGENLFFRKNWLRLTW |
| 7974 | RSLsESYELFFRKNWLRLTW |
| 7975 | RSLsPGGAAFFRKNWLRLTW |
| 7976 | RSLsPGGAFFFRKNWLRLTW |
| 7977 | RSLsPGGALFFRKNWLRLTW |
| 7978 | RSLsPGGAMFFRKNWLRLTW |
| 7979 | RSLsPGGAVFFRKNWLRLTW |
| 7980 | RSLsPLLFFFRKNWLRLTW |
| 7981 | RSLsPLLLFFRKNWLRLTW |
| 7982 | RSLsPLLMFFRKNWLRLTW |
| 7983 | RSLsPLLVFFRKNWLRLTW |
| 7984 | RSLsQELVGVFFRKNWLRLTW |
| 7985 | RSLsVEIVKFFRKNWLRLTW |
| 7986 | RSLsVEIVYFFRKNWLRLTW |
| 7987 | RSMsMPVAHFFRKNWLRLTW |
| 7988 | RSMsMPVAKFFRKNWLRLTW |
| 7989 | RsPEDEYELLMPHRISSHFFRKNWLRLTW |
| 7990 | RSRRsPLLKFFRKNWLRLTW |
| 7991 | RSRRsPLLYFFRKNWLRLTW |
| 7992 | RSRsPLELFFRKNWLRLTW |
| 7993 | RSRsPPPVSKFFRKNWLRLTW |
| 7994 | RSRsPPPVSYFFRKNWLRLTW |
| 7995 | RSRsPRPAFFFRKNWLRLTW |
| 7996 | RSRsPRPAIFFRKNWLRLTW |
| 7997 | RSRsPRPALFFRKNWLRLTW |
| 7998 | RSRsPRPAMFFRKNWLRLTW |
| 7999 | RSRsPRPAVFFRKNWLRLTW |
| 8000 | RSRsPRPAXFFRKNWLRLTW |
| 8001 | RSRTsPITRRFFRKNWLRLTW |
| 8002 | RSRTsPITRYFFRKNWLRLTW |
| 8003 | RSSsLIRHKFFRKNWLRLTW |
| 8004 | RSSsLIRHYFFRKNWLRLTW |
| 8005 | RSVsLSMRKFFRKNWLRLTW |
| 8006 | RSVsLSMRYFFRKNWLRLTW |
| 8007 | RsWKYNQSISLRRPFFRKNWLRLTW |
| 8008 | RSYsGSRsKFFRKNWLRLTW |
| 8009 | RSYsGSRsRFFRKNWLRLTW |
| 8010 | RSYsGSRsYFFRKNWLRLTW |
| 8011 | RSYsPDHRQKFFRKNWLRLTW |
| 8012 | RSYsPDHRQYFFRKNWLRLTW |
| 8013 | RSYsPERSKFFRKNWLRLTW |
| 8014 | RSYsPERSYFFRKNWLRLTW |
| 8015 | RSYsPRNSRFFRKNWLRLTW |
| 8016 | RSYsPRNSYFFRKNWLRLTW |
| 8017 | RSYSRsFSKFFRKNWLRLTW |
| 8018 | RSYsRSFSRFFRKNWLRLTW |
| 8019 | RSYSRsFSRFFRKNWLRLTW |
| 8020 | RSYSRsFSYFFRKNWLRLTW |
| 8021 | RSYsYPRQKFFRKNWLRLTW |
| 8022 | RSYsYPRQYFFRKNWLRLTW |
| 8023 | RSYVTTSTRTYsLGFFRKNWLRLTW |
| 8024 | RTAsFAVRKFFRKNWLRLTW |
| 8025 | RTAsFAVRYFFRKNWLRLTW |
| 8026 | RTAsLIIKVFFRKNWLRLTW |
| 8027 | RTAsPPPPPKFFRKNWLRLTW |
| 8028 | RTDPSKsPGSLRYFFRKNWLRLTW |
| 8029 | RTDsPKIDLFFRKNWLRLTW |
| 8030 | RTDsPKIDYFFRKNWLRLTW |
| 8031 | RTDsRAQAVFFRKNWLRLTW |
| 8032 | RTDsRAQAYFFRKNWLRLTW |
| 8033 | RTDsYVELSQYFFRKNWLRLTW |
| 8034 | RTEPSKsPGSLRYFFRKNWLRLTW |
| 8035 | RTEsDSGLKFFFRKNWLRLTW |
| 8036 | RTEsDSGLKKFFRKNWLRLTW |
| 8037 | RTEsDSGLKLFFRKNWLRLTW |
| 8038 | RTEsDSGLKMFFRKNWLRLTW |
| 8039 | RTEsDSGLKVFFRKNWLRLTW |
| 8040 | RTEsPKIDLFFRKNWLRLTW |
| 8041 | RTEsPKIDYFFRKNWLRLTW |
| 8042 | RTEsRAQAVFFRKNWLRLTW |
| 8043 | RTEsRAQAYFFRKNWLRLTW |
| 8044 | RTEsYVELSQYFFRKNWLRLTW |
| 8045 | RTFsLDTILFFRKNWLRLTW |
| 8046 | RTFsPTYGFFFRKNWLRLTW |
| 8047 | RTFsPTYGLFFRKNWLRLTW |
| 8048 | RTFsPTYGMFFRKNWLRLTW |
| 8049 | RTFsPTYGVFFRKNWLRLTW |
| 8050 | RTHsLLLLLFFRKNWLRLTW |
| 8051 | RTLsHISEAFFRKNWLRLTW |
| 8052 | RTLsHISEVFFRKNWLRLTW |
| 8053 | RTLsPEIITVFFRKNWLRLTW |
| 8054 | RTMsEAALVRKFFRKNWLRLTW |
| 8055 | RTNsPGFQKFFRKNWLRLTW |
| 8056 | RTPsDVKELFFRKNWLRLTW |
| 8057 | RTPsFLKKNKFFRKNWLRLTW |
| 8058 | RTPsFLKKNYFFRKNWLRLTW |
| 8059 | RTRsLSSLREKFFRKNWLRLTW |
| 8060 | RTRsLSSLREYFFRKNWLRLTW |
| 8061 | RTRsPSPTFFFRKNWLRLTW |
| 8062 | RTRsPSPTLFFRKNWLRLTW |
| 8063 | RTRsPSPTMFFRKNWLRLTW |
| 8064 | RTRsPSPTVFFRKNWLRLTW |
| 8065 | RTSsFALNLFFRKNWLRLTW |
| 8066 | RTSsFTEQLFFRKNWLRLTW |
| 8067 | RTSsFTFQNFFRKNWLRLTW |
| 8068 | RTSSFtFQNFFRKNWLRLTW |
| 8069 | RTSsPLFNKFFRKNWLRLTW |
| 8070 | RTYKsPLRHFFRKNWLRLTW |
| 8071 | RTYKsPLRKFFRKNWLRLTW |
| 8072 | RTYKsPLRYFFRKNWLRLTW |
| 8073 | RTYsGPMNKFFRKNWLRLTW |
| 8074 | RTYsGPMNKVFFRKNWLRLTW |
| 8075 | RTYsHGTYRFFRKNWLRLTW |
| 8076 | RVAsFAVRKFFRKNWLRLTW |
| 8077 | RVAsFAVRYFFRKNWLRLTW |
| 8078 | RVAsPLVHKFFRKNWLRLTW |
| 8079 | RVAsPLVHYFFRKNWLRLTW |
| 8080 | RVAsPPPPPKFFRKNWLRLTW |
| 8081 | RVAsPPPPPYFFRKNWLRLTW |
| 8082 | RVAsPTSGVFFRKNWLRLTW |
| 8083 | RVAsPTSGVKFFRKNWLRLTW |
| 8084 | RVAsPTSGVKKFFRKNWLRLTW |
| 8085 | RVAsPTSGVKRFFRKNWLRLTW |
| 8086 | RVAsPTSGVYFFRKNWLRLTW |
| 8087 | RVDsPSHGLFFRKNWLRLTW |
| 8088 | RVGsLVLNLFFRKNWLRLTW |
| 8089 | RVIsGVLQLFFRKNWLRLTW |
| 8090 | RVKLPsGSKKFFRKNWLRLTW |
| 8091 | RVKsPGsGHVKFFRKNWLRLTW |
| 8092 | RVKsPGsGHVYFFRKNWLRLTW |
| 8093 | RVKsPISLKFFRKNWLRLTW |
| 8094 | RVKsPSPKSERFFRKNWLRLTW |
| 8095 | RVKsPSPKSEYFFRKNWLRLTW |
| 8096 | RVKtPTSQSYKFFRKNWLRLTW |
| 8097 | RVKtPTSQSYRFFRKNWLRLTW |
| 8098 | RVKtPTSQSYYFFRKNWLRLTW |
| 8099 | RVKTtPLRRFFRKNWLRLTW |
| 8100 | RVKTtPLRYFFRKNWLRLTW |
| 8101 | RVLDRSPsRSAKFFRKNWLRLTW |
| 8102 | RVLDRSPsRSAYFFRKNWLRLTW |
| 8103 | RVLHsPPAVFFRKNWLRLTW |
| 8104 | RVLsGWTKFFRKNWLRLTW |
| 8105 | RVLsPLIIKFFRKNWLRLTW |
| 8106 | RVPsLLVLLFFRKNWLRLTW |
| 8107 | RVPsSTLKKFFRKNWLRLTW |
| 8108 | RVPsSTLKYFFRKNWLRLTW |
| 8109 | RVRKLPsTTLFFRKNWLRLTW |
| 8110 | RVRQsPLATKFFRKNWLRLTW |
| 8111 | RVRQsPLATRFFRKNWLRLTW |
| 8112 | RVRQsPLATYFFRKNWLRLTW |
| 8113 | RVRRsSFLNAKFFRKNWLRLTW |
| 8114 | RVRsLSSLREKFFRKNWLRLTW |
| 8115 | RVRsLSSLREYFFRKNWLRLTW |
| 8116 | RVRsPTRSFFFRKNWLRLTW |
| 8117 | RVRsPTRSLFFRKNWLRLTW |
| 8118 | RVRsPTRSMFFRKNWLRLTW |
| 8119 | RVRsPTRSPFFRKNWLRLTW |
| 8120 | RVRsPTRSVFFRKNWLRLTW |
| 8121 | RVSsPISKKFFRKNWLRLTW |
| 8122 | RVSsPISKYFFRKNWLRLTW |
| 8123 | RVSsRFSSKFFRKNWLRLTW |
| 8124 | RVSsRFSSRFFRKNWLRLTW |
| 8125 | RVSsRFSSYFFRKNWLRLTW |
| 8126 | RVSsVKLISRFFRKNWLRLTW |
| 8127 | RVSsVKLISYFFRKNWLRLTW |
| 8128 | RVTsAEIKLFFRKNWLRLTW |
| 8129 | RWsLSMRKFFRKNWLRLTW |
| 8130 | RWsLSMRYFFRKNWLRLTW |
| 8131 | RVWEDRPSsAFFRKNWLRLTW |
| 8132 | RVWsPPRVHKVFFRKNWLRLTW |
| 8133 | RVYQyIQSRFFRKNWLRLTW |
| 8134 | RVYQyIQSRFKFFRKNWLRLTW |
| 8135 | RVYQyIQSRFYFFRKNWLRLTW |
| 8136 | RVYQyIQSRKFFRKNWLRLTW |
| 8137 | RVYQyIQSRYFFRKNWLRLTW |
| 8138 | RVYsPYNHKFFRKNWLRLTW |
| 8139 | RVYsPYNHRFFRKNWLRLTW |
| 8140 | RVYsPYNHYFFRKNWLRLTW |
| 8141 | RVYSRsFSKFFRKNWLRLTW |
| 8142 | RVYSRsFSYFFRKNWLRLTW |
| 8143 | RYPsNLQLFFFRKNWLRLTW |
| 8144 | RYQtQPVTLFFRKNWLRLTW |
| 8145 | SAARESHPHGVKRSAsPDDDLGFFRKNWLRLTW |
| 8146 | SARGsPTRPNPPVRFFRKNWLRLTW |
| 8147 | SARRtPVSYFFRKNWLRLTW |
| 8148 | sDDEKMPDLEFFRKNWLRLTW |
| 8149 | sDFHAERAAREKFFRKNWLRLTW |
| 8150 | SDmPRAHsFFFRKNWLRLTW |
| 8151 | SDMPRAHsFFFRKNWLRLTW |
| 8152 | SEFKAMDsIFFRKNWLRLTW |
| 8153 | SEGsLHRKFFFRKNWLRLTW |
| 8154 | SEGsLHRKWFFRKNWLRLTW |
| 8155 | SEGsLHRKYFFRKNWLRLTW |
| 8156 | SELsPGRSVFFRKNWLRLTW |
| 8157 | SFDsGSVRLFFRKNWLRLTW |
| 8158 | SGGAQsPLRYLHVLFFRKNWLRLTW |
| 8159 | sGGDDDWTHLSSKEVDPSTFFRKNWLRLTW |
| 8160 | sGGDDDWTHLSSKEVDPSTGFFRKNWLRLTW |
| 8161 | sGGDDDWTHLSSKEVDPSTGEFFRKNWLRLTW |
| 8162 | sGGDDDWTHLSSKEVDPSTGELFFRKNWLRLTW |
| 8163 | sGGDDDWTHLSSKEVDPSTGELQFFRKNWLRLTW |
| 8164 | SGPKPLFRRMsSLVGPTQFFRKNWLRLTW |
| 8165 | SIDsPQKLFFRKNWLRLTW |
| 8166 | SIDsPQKYFFRKNWLRLTW |
| 8167 | SILsFVSGLFFRKNWLRLTW |
| 8168 | SIMsFHIDLFFRKNWLRLTW |
| 8169 | SImsPEIQLFFRKNWLRLTW |
| 8170 | SIMsPEIQLFFRKNWLRLTW |
| 8171 | SIPtVSGQIFFRKNWLRLTW |
| 8172 | SISsMEVNVFFRKNWLRLTW |
| 8173 | SISStPPAVFFRKNWLRLTW |
| 8174 | SKEDKNGHDGDTHQEDDGEKsDFFRKNWLRLTW |
| 8175 | SKRGyIGLFFRKNWLRLTW |
| 8176 | SKtVATFILFFRKNWLRLTW |
| 8177 | SLAsLTEKIFFRKNWLRLTW |
| 8178 | SLDSEDYsLFFRKNWLRLTW |
| 8179 | SLDsLGDVFLFFRKNWLRLTW |
| 8180 | SLDsPSYVLYFFRKNWLRLTW |
| 8181 | SLEsPSYVLYFFRKNWLRLTW |
| 8182 | SLFGGsVKLFFRKNWLRLTW |
| 8183 | SLFKRLYsLFFRKNWLRLTW |
| 8184 | SLFsGDEENAFFRKNWLRLTW |
| 8185 | SLFsGSYSSLFFRKNWLRLTW |
| 8186 | SLFsPQNTLFFRKNWLRLTW |
| 8187 | SLFsPRRNKFFRKNWLRLTW |
| 8188 | SLFsPRRNYFFRKNWLRLTW |
| 8189 | SLFsSEESNLFFRKNWLRLTW |
| 8190 | SLFsSEESNLGAFFRKNWLRLTW |
| 8191 | SLHDIQLsLFFRKNWLRLTW |
| 8192 | SLKsPVTVKFFRKNWLRLTW |
| 8193 | SLLAsPGHISVFFRKNWLRLTW |
| 8194 | SLLHTSRsLFFRKNWLRLTW |
| 8195 | SLLNKSsPVKFFRKNWLRLTW |
| 8196 | SLLNKSsPVKKFFRKNWLRLTW |
| 8197 | SLLNKSsPVKYFFRKNWLRLTW |
| 8198 | SLLsLHVDLFFRKNWLRLTW |
| 8199 | SLLTsPPKAFFRKNWLRLTW |
| 8200 | SLLTsPPKVFFRKNWLRLTW |
| 8201 | SLMsGTLESLFFRKNWLRLTW |
| 8202 | SLMsPGRRKFFRKNWLRLTW |
| 8203 | SLMsPGRRYFFRKNWLRLTW |
| 8204 | SLQPRSHsVFFRKNWLRLTW |
| 8205 | SLQsLETSVFFRKNWLRLTW |
| 8206 | SLRRsVLMKFFRKNWLRLTW |
| 8207 | SLRRsVLMYFFRKNWLRLTW |
| 8208 | SLSsLLVKLFFRKNWLRLTW |
| 8209 | SLtRSPPRVFFRKNWLRLTW |
| 8210 | SLTRsPPRVFFRKNWLRLTW |
| 8211 | SLVDGyFRLFFRKNWLRLTW |
| 8212 | SLYDRPAsYFFRKNWLRLTW |
| 8213 | SLYsPVKKKFFRKNWLRLTW |
| 8214 | SMFsPRRNKFFRKNWLRLTW |
| 8215 | SMKsPVTVKFFRKNWLRLTW |
| 8216 | SMLNKSsPVKFFRKNWLRLTW |
| 8217 | SMLNKSsPVKKFFRKNWLRLTW |
| 8218 | SMLsQEIQTLFFRKNWLRLTW |
| 8219 | SMLTsPPKAFFRKNWLRLTW |
| 8220 | SMLTsPPKVFFRKNWLRLTW |
| 8221 | SMMsPGRRKFFRKNWLRLTW |
| 8222 | SMQPRSHsVFFRKNWLRLTW |
| 8223 | SMRRsVLMKFFRKNWLRLTW |
| 8224 | SMSsLSREVFFRKNWLRLTW |
| 8225 | SMtRSPPRVFFRKNWLRLTW |
| 8226 | SMTRsPPRVFFRKNWLRLTW |
| 8227 | SMYsPVKKKFFRKNWLRLTW |
| 8228 | SNFKsPVKTIRFFRKNWLRLTW |
| 8229 | SPAASISRLsGEQVDGKGFFRKNWLRLTW |
| 8230 | SPAsPKISFFFRKNWLRLTW |
| 8231 | SPAsPKISLFFRKNWLRLTW |
| 8232 | SPAsPKISMFFRKNWLRLTW |
| 8233 | SPAsPKISVFFRKNWLRLTW |
| 8234 | SPDsSQSSLFFRKNWLRLTW |
| 8235 | sPEDEYELLMPHRISSHFFRKNWLRLTW |
| 8236 | SPEDEYELLMPHRIsSHFFRKNWLRLTW |
| 8237 | SPEKAGRRsSFFFRKNWLRLTW |
| 8238 | SPEKAGRRsSLFFRKNWLRLTW |
| 8239 | SPEKAGRRsSMFFRKNWLRLTW |
| 8240 | SPEKAGRRsSVFFRKNWLRLTW |
| 8241 | sPERPFLAILGGAKVADKFFRKNWLRLTW |
| 8242 | sPERPFLAILGGAKVADKIQFFRKNWLRLTW |
| 8243 | SPFKRQLsFFFRKNWLRLTW |
| 8244 | SPFKRQLsLFFRKNWLRLTW |
| 8245 | SPFKRQLsMFFRKNWLRLTW |
| 8246 | SPFKRQLsVFFRKNWLRLTW |
| 8247 | SPFLsKRSLFFRKNWLRLTW |
| 8248 | SPGLARKRsFFFRKNWLRLTW |
| 8249 | SPGLARKRsLFFRKNWLRLTW |
| 8250 | SPGLARKRsMFFRKNWLRLTW |
| 8251 | SPGLARKRsVFFRKNWLRLTW |
| 8252 | SPGsPRPAFFFRKNWLRLTW |
| 8253 | SPGsPRPALFFRKNWLRLTW |
| 8254 | SPGsPRPAMFFRKNWLRLTW |
| 8255 | SPGsPRPAVFFRKNWLRLTW |
| 8256 | SPKsPGLKAFFRKNWLRLTW |
| 8257 | SPKsPGLKFFFRKNWLRLTW |
| 8258 | SPKsPGLKLFFRKNWLRLTW |
| 8259 | SPKsPGLKMFFRKNWLRLTW |
| 8260 | SPKsPGLKVFFRKNWLRLTW |
| 8261 | SPKsPTAAFFFRKNWLRLTW |
| 8262 | SPKsPTAALFFRKNWLRLTW |
| 8263 | SPKsPTAAMFFRKNWLRLTW |
| 8264 | SPKsPTAAVFFRKNWLRLTW |
| 8265 | SPLTKSIsLFFRKNWLRLTW |
| 8266 | sPPFPVPVYTRQAPKQVIKFFRKNWLRLTW |
| 8267 | SPRAPVsPLKFFFRKNWLRLTW |
| 8268 | SPRERsPALFFRKNWLRLTW |
| 8269 | SPRGEAsSLFFRKNWLRLTW |
| 8270 | SPRGEASsLFFRKNWLRLTW |
| 8271 | SPRPPNsPSIFFRKNWLRLTW |
| 8272 | SPRRsLGLALFFRKNWLRLTW |
| 8273 | SPRRsRSISFFFRKNWLRLTW |
| 8274 | SPRRsRSISFFFRKNWLRLTW |
| 8275 | SPRRsRSIsLFFRKNWLRLTW |
| 8276 | SPRRsRSISLFFRKNWLRLTW |
| 8277 | SPRRsRSIsMFFRKNWLRLTW |
| 8278 | SPRRsRSISMFFRKNWLRLTW |
| 8279 | SPRRsRSIsVFFRKNWLRLTW |
| 8280 | SPRRsRSISVFFRKNWLRLTW |
| 8281 | SPRsITSTFFFRKNWLRLTW |
| 8282 | SPRsITSTLFFRKNWLRLTW |
| 8283 | SPRsITSTMFFRKNWLRLTW |
| 8284 | SPRsITSTPFFRKNWLRLTW |
| 8285 | SPRsITSTVFFRKNWLRLTW |
| 8286 | SPRsPDRTLFFRKNWLRLTW |
| 8287 | SPRsPGKPFFFRKNWLRLTW |
| 8288 | SPRsPGKPLFFRKNWLRLTW |
| 8289 | SPRsPGKPMFFRKNWLRLTW |
| 8290 | SPRsPGKPVFFRKNWLRLTW |
| 8291 | SPRsPGRSFFFRKNWLRLTW |
| 8292 | SPRsPGRSIFFRKNWLRLTW |
| 8293 | SPRsPGRSLFFRKNWLRLTW |
| 8294 | SPRsPGRSMFFRKNWLRLTW |
| 8295 | SPRsPGRSVFFRKNWLRLTW |
| 8296 | SPRsPGRSXFFRKNWLRLTW |
| 8297 | SPRsPSGLRFFRKNWLRLTW |
| 8298 | SPRsPSTTYFFFRKNWLRLTW |
| 8299 | SPRsPSTTYLFFRKNWLRLTW |
| 8300 | SPRSPsTTYLFFRKNWLRLTW |
| 8301 | SPRsPSTTYMFFRKNWLRLTW |
| 8302 | SPRsPSTTYVFFRKNWLRLTW |
| 8303 | SPRsSQLVFFRKNWLRLTW |
| 8304 | SPRtPVsPVKFFFRKNWLRLTW |
| 8305 | SPRTPVsPVKFFFRKNWLRLTW |
| 8306 | SPRtPVsPVKLFFRKNWLRLTW |
| 8307 | SPRTPVsPVKLFFRKNWLRLTW |
| 8308 | SPRtPVsPVKMFFRKNWLRLTW |
| 8309 | SPRTPVsPVKMFFRKNWLRLTW |
| 8310 | SPRtPVsPVKVFFRKNWLRLTW |
| 8311 | SPRTPVsPVKVFFRKNWLRLTW |
| 8312 | SPSsPSVRRQFFFRKNWLRLTW |
| 8313 | SPSsPSVRRQLFFRKNWLRLTW |
| 8314 | SPSsPSVRRQMFFRKNWLRLTW |
| 8315 | SPSsPSVRRQVFFRKNWLRLTW |
| 8316 | SPSTSRSGGsSRFFFRKNWLRLTW |
| 8317 | SPSTSRSGGsSRLFFRKNWLRLTW |
| 8318 | SPSTSRSGGsSRMFFRKNWLRLTW |
| 8319 | SPSTSRSGGsSRVFFRKNWLRLTW |
| 8320 | sPTRPNPPVRNLHFFRKNWLRLTW |
| 8321 | SPVsPMKELFFRKNWLRLTW |
| 8322 | SPVsTRPLEPFFRKNWLRLTW |
| 8323 | SPVStRPLEPFFRKNWLRLTW |
| 8324 | SPWHQsFFFRKNWLRLTW |
| 8325 | SPWHQsLFFRKNWLRLTW |
| 8326 | SPWHQsMFFRKNWLRLTW |
| 8327 | SPWHQsVFFRKNWLRLTW |
| 8328 | SQIsPKSWGVFFRKNWLRLTW |
| 8329 | SRDKHsEYFFRKNWLRLTW |
| 8330 | SREKHsEIFFRKNWLRLTW |
| 8331 | SREKHsElFFRKNWLRLTW |
| 8332 | SRFNRRVsVFFRKNWLRLTW |
| 8333 | SRLTHLsFFFRKNWLRLTW |
| 8334 | SRLTHLsKFFRKNWLRLTW |
| 8335 | SRLTHLsLFFRKNWLRLTW |
| 8336 | SRLTHLsMFFRKNWLRLTW |
| 8337 | SRLTHLsRFFRKNWLRLTW |
| 8338 | SRLTHLsYFFRKNWLRLTW |
| 8339 | SRMsPKAQFFFRKNWLRLTW |
| 8340 | SRMsPKAQKFFRKNWLRLTW |
| 8341 | SRMsPKAQLFFRKNWLRLTW |
| 8342 | SRMsPKAQMFFRKNWLRLTW |
| 8343 | SRMsPKAQRFFRKNWLRLTW |
| 8344 | SRMsPKAQYFFRKNWLRLTW |
| 8345 | SRsSRSPYSRFFRKNWLRLTW |
| 8346 | SRSsSVLsLFFRKNWLRLTW |
| 8347 | SRSSsVLSLFFRKNWLRLTW |
| 8348 | SRSSSVLsLFFRKNWLRLTW |
| 8349 | SRTsPITRFFFRKNWLRLTW |
| 8350 | SRTsPITRKFFRKNWLRLTW |
| 8351 | SRTsPITRLFFRKNWLRLTW |
| 8352 | SRTsPITRMFFRKNWLRLTW |
| 8353 | SRTsPITRRFFRKNWLRLTW |
| 8354 | SRTsPITRYFFRKNWLRLTW |
| 8355 | SRWsGSHQFFFRKNWLRLTW |
| 8356 | SRWsGSHQKFFRKNWLRLTW |
| 8357 | SRWsGSHQRFFRKNWLRLTW |
| 8358 | SRWsGSHQYFFRKNWLRLTW |
| 8359 | SRYsRsPYSFFFRKNWLRLTW |
| 8360 | SRYsRSPYSFFFRKNWLRLTW |
| 8361 | SRYSRsPYSFFFRKNWLRLTW |
| 8362 | SRYsRsPYSKFFRKNWLRLTW |
| 8363 | SRYsRSPYSFFFRKNWLRLTW |
| 8364 | SRYSRsPYSFFFRKNWLRLTW |
| 8365 | SRYsRsPYSLFFRKNWLRLTW |
| 8366 | SRYsRSPYSLFFRKNWLRLTW |
| 8367 | SRYSRsPYSLFFRKNWLRLTW |
| 8368 | SRYsRsPYSMFFRKNWLRLTW |
| 8369 | SRYsRSPYSMFFRKNWLRLTW |
| 8370 | SRYSRsPYSMFFRKNWLRLTW |
| 8371 | SRYsRsPYSRFFRKNWLRLTW |
| 8372 | SRYsRSPYSRFFRKNWLRLTW |
| 8373 | SRYSRsPYSRFFRKNWLRLTW |
| 8374 | SRYsRsPYSYFFRKNWLRLTW |
| 8375 | SRYsRSPYSYFFRKNWLRLTW |
| 8376 | SRYSRsPYSYFFRKNWLRLTW |
| 8377 | SRYsRtsPYSRFFRKNWLRLTW |
| 8378 | SSDIsPTRLFFRKNWLRLTW |
| 8379 | SSDIsPTRYFFRKNWLRLTW |
| 8380 | SSDKHsEYFFRKNWLRLTW |
| 8381 | SSDPASQLsYFFRKNWLRLTW |
| 8382 | SSDsETLRYFFRKNWLRLTW |
| 8383 | SSDsPQKLFFRKNWLRLTW |
| 8384 | SSDsPQKYFFRKNWLRLTW |
| 8385 | SSDsPSYVLYFFRKNWLRLTW |
| 8386 | SSDsPTNHFFFFRKNWLRLTW |
| 8387 | SSEIsPTRYFFRKNWLRLTW |
| 8388 | SSEKHsEYFFRKNWLRLTW |
| 8389 | SSEPASQLsYFFRKNWLRLTW |
| 8390 | SSEsETLRYFFRKNWLRLTW |
| 8391 | SSEsPQKLFFRKNWLRLTW |
| 8392 | SSEsPQKYFFRKNWLRLTW |
| 8393 | SSEsPSYVLYFFRKNWLRLTW |
| 8394 | SSEsPTNHFYFFRKNWLRLTW |
| 8395 | SSNGKMASRRsEEKEAGFFRKNWLRLTW |
| 8396 | SSNGKMASRRsEEKEAGEIFFRKNWLRLTW |
| 8397 | SsPIMRKKVSLFFRKNWLRLTW |
| 8398 | sSPPFPVPVYTRQAPKQVIKFFRKNWLRLTW |
| 8399 | SSsPTHAKSAHVFFRKNWLRLTW |
| 8400 | SSsWRILGSKQSEHRPFFRKNWLRLTW |
| 8401 | STDIsPTRLFFRKNWLRLTW |
| 8402 | STDIsPTRYFFRKNWLRLTW |
| 8403 | STDKHsEYFFRKNWLRLTW |
| 8404 | STDPASQLsYFFRKNWLRLTW |
| 8405 | STDsETLRYFFRKNWLRLTW |
| 8406 | STDsPQKYFFRKNWLRLTW |
| 8407 | STDsPSYVLYFFRKNWLRLTW |
| 8408 | STDsPTNHFYFFRKNWLRLTW |
| 8409 | STEIsPTRLFFRKNWLRLTW |
| 8410 | STEIsPTRYFFRKNWLRLTW |
| 8411 | STEKHsEYFFRKNWLRLTW |
| 8412 | STEPASQLsYFFRKNWLRLTW |
| 8413 | STEsETLRYFFRKNWLRLTW |
| 8414 | STEsPQKYFFRKNWLRLTW |
| 8415 | STEsPSYVLYFFRKNWLRLTW |
| 8416 | STEsPTNHFYFFRKNWLRLTW |
| 8417 | STIQNsPTKKFFRKNWLRLTW |
| 8418 | sTMSLNIITVFFRKNWLRLTW |
| 8419 | STMsLNIITVFFRKNWLRLTW |
| 8420 | SVDIsPIRLFFRKNWLRLTW |
| 8421 | SVDIsPTRLFFRKNWLRLTW |
| 8422 | SVDIsPTRYFFRKNWLRLTW |
| 8423 | SVFsPSFGLFFRKNWLRLTW |
| 8424 | SVGsDYYIQLFFRKNWLRLTW |
| 8425 | SVKPRRTsLFFRKNWLRLTW |
| 8426 | SVKsPVTVKFFRKNWLRLTW |
| 8427 | SVKsPVTVYFFRKNWLRLTW |
| 8428 | SVLsPSFQLFFRKNWLRLTW |
| 8429 | SVMDsPKKLFFRKNWLRLTW |
| 8430 | SVRRsVLMKFFRKNWLRLTW |
| 8431 | SVRRsVLMYFFRKNWLRLTW |
| 8432 | SVRsLSLSLFFRKNWLRLTW |
| 8433 | SVYsGDFGNLEVFFRKNWLRLTW |
| 8434 | SVYsPVKKKFFRKNWLRLTW |
| 8435 | SVYsPVKKYFFRKNWLRLTW |
| 8436 | sYIEHIFEIFFRKNWLRLTW |
| 8437 | SYPsPVATSYFFRKNWLRLTW |
| 8438 | sYQKVIELFFFRKNWLRLTW |
| 8439 | TDKYsKMMFFRKNWLRLTW |
| 8440 | TEAsPESMLFFRKNWLRLTW |
| 8441 | THKGEIRGASTPFQFRAssPFFRKNWLRLTW |
| 8442 | TIGEKKEPsDKSVDSFFRKNWLRLTW |
| 8443 | TKDKYMASRGQKAKsMEGFFRKNWLRLTW |
| 8444 | TKsVKALSSLHGDDFFRKNWLRLTW |
| 8445 | TKsVKALSSLHGDDQFFRKNWLRLTW |
| 8446 | TKsVKALSSLHGDDQDFFRKNWLRLTW |
| 8447 | TLAsPSVFKSTFFRKNWLRLTW |
| 8448 | TLAsPSVFKSVFFRKNWLRLTW |
| 8449 | TLLAsPMLKFFRKNWLRLTW |
| 8450 | TLMERTVsLFFRKNWLRLTW |
| 8451 | TLSsPPPGLFFRKNWLRLTW |
| 8452 | TMAsPGKDNYFFRKNWLRLTW |
| 8453 | TMAsPSVFKSTFFRKNWLRLTW |
| 8454 | TMAsPSVFKSVFFRKNWLRLTW |
| 8455 | TMDsPGKDNYFFRKNWLRLTW |
| 8456 | TMEsPGKDNYFFRKNWLRLTW |
| 8457 | TMMsPSQFLFFRKNWLRLTW |
| 8458 | TPAQPQRRsFFFRKNWLRLTW |
| 8459 | TPAQPQRRsLFFRKNWLRLTW |
| 8460 | TPAQPQRRsMFFRKNWLRLTW |
| 8461 | TPAQPQRRsVFFRKNWLRLTW |
| 8462 | TPDPSKFFSQLsSEHGGDVFFRKNWLRLTW |
| 8463 | tPDPSKFFSQLSSEHGGDVQFFRKNWLRLTW |
| 8464 | TPIsPGRASGFFFRKNWLRLTW |
| 8465 | TPIsPGRASGLFFRKNWLRLTW |
| 8466 | TPIsPGRASGMFFRKNWLRLTW |
| 8467 | TPIsPGRASGVFFRKNWLRLTW |
| 8468 | TPMKKHLsLFFRKNWLRLTW |
| 8469 | TPRsPPLGFFFRKNWLRLTW |
| 8470 | TPRsPPLGLFFRKNWLRLTW |
| 8471 | TPRsPPLGLFFFRKNWLRLTW |
| 8472 | TPRsPPLGLIFFRKNWLRLTW |
| 8473 | TPRsPPLGLLFFRKNWLRLTW |
| 8474 | TPRsPPLGLMFFRKNWLRLTW |
| 8475 | TPRsPPLGLVFFRKNWLRLTW |
| 8476 | TPRsPPLGMFFRKNWLRLTW |
| 8477 | TPRsPPLGVFFRKNWLRLTW |
| 8478 | TQSSGKsSVFFRKNWLRLTW |
| 8479 | TRKtPESFLFFRKNWLRLTW |
| 8480 | TRLsPAKIVLFFFRKNWLRLTW |
| 8481 | TRLsPAKIVLKFFRKNWLRLTW |
| 8482 | TRLsPAKIVLRFFRKNWLRLTW |
| 8483 | TRLsPAKIVLYFFRKNWLRLTW |
| 8484 | TSAsPGKDNYFFRKNWLRLTW |
| 8485 | TSDsPGKDNYFFRKNWLRLTW |
| 8486 | TSDtPDYLLKYFFRKNWLRLTW |
| 8487 | TSEsPGKDNYFFRKNWLRLTW |
| 8488 | TSEtPDYLLKYFFRKNWLRLTW |
| 8489 | TTAsPGKDNYFFRKNWLRLTW |
| 8490 | TTDsPGKDNYFFRKNWLRLTW |
| 8491 | TTDtPDYLLKYFFRKNWLRLTW |
| 8492 | TTEsPGKDNYFFRKNWLRLTW |
| 8493 | TTEtPDYLLKYFFRKNWLRLTW |
| 8494 | TTKsVKALSSLHGFFRKNWLRLTW |
| 8495 | TTKsVKALSSLHGDDFFRKNWLRLTW |
| 8496 | TTKsVKALSSLHGDDQFFRKNWLRLTW |
| 8497 | TTKsVKALSSLHGDDQDFFRKNWLRLTW |
| 8498 | TTKsVKALSSLHGDDQDSFFRKNWLRLTW |
| 8499 | TTKsVKALSSLHGDDQDsEDFFRKNWLRLTW |
| 8500 | TTKSVKALSSLHGDDQDsEDFFRKNWLRLTW |
| 8501 | TTKsVKALSSLHGDDQDsEDEFFRKNWLRLTW |
| 8502 | TTKSVKALSSLHGDDQDsEDEFFRKNWLRLTW |
| 8503 | TVFsPTLPAAFFRKNWLRLTW |
| 8504 | TVMsNSSVIHLFFRKNWLRLTW |
| 8505 | VAKRLsLFFRKNWLRLTW |
| 8506 | VAMPVKKSPRRSsSDEQGLSYSSLKNVFFRKNWLRLTW |
| 8507 | VIDsQELSKVFFRKNWLRLTW |
| 8508 | VLDsPASKKFFRKNWLRLTW |
| 8509 | VLFPEsPARAFFRKNWLRLTW |
| 8510 | VLFRtPLASVFFRKNWLRLTW |
| 8511 | VLFsSPPQMFFRKNWLRLTW |
| 8512 | VLFSsPPQMFFRKNWLRLTW |
| 8513 | VLIENVAsLFFRKNWLRLTW |
| 8514 | VLIGsPKKVFFRKNWLRLTW |
| 8515 | VLIGsPKKYFFRKNWLRLTW |
| 8516 | VLKGsRSSELFFRKNWLRLTW |
| 8517 | VLKGsRSSEVFFRKNWLRLTW |
| 8518 | VLKSRKssVTEEFFRKNWLRLTW |
| 8519 | VLKVMIGsPKFFRKNWLRLTW |
| 8520 | VLKVMIGsPKKFFRKNWLRLTW |
| 8521 | VLKVMIGsPKKKFFRKNWLRLTW |
| 8522 | VLLsPVPELFFRKNWLRLTW |
| 8523 | VLLsPVPEVFFRKNWLRLTW |
| 8524 | VLMK(sPs)PALFFRKNWLRLTW |
| 8525 | VLMK(sPs)PAVFFRKNWLRLTW |
| 8526 | VLQtPPYVKFFRKNWLRLTW |
| 8527 | VLQtPPYVKKFFRKNWLRLTW |
| 8528 | VLQtPPYVKYFFRKNWLRLTW |
| 8529 | VLSDVIPsIFFRKNWLRLTW |
| 8530 | VLSSLtPAKVFFRKNWLRLTW |
| 8531 | VLWDTPsIFFRKNWLRLTW |
| 8532 | VLYsPQMALFFRKNWLRLTW |
| 8533 | VMFRtPLASVFFRKNWLRLTW |
| 8534 | VMIGsKKVFFRKNWLRLTW |
| 8535 | VMIGsPKKVFFRKNWLRLTW |
| 8536 | VMIGsPKKYFFRKNWLRLTW |
| 8537 | VMKVMIGsPKFFRKNWLRLTW |
| 8538 | VMKVMIGsPKKFFRKNWLRLTW |
| 8539 | VMKVMIGsPKKKFFRKNWLRLTW |
| 8540 | VMKVMIGsPKKYFFRKNWLRLTW |
| 8541 | VMLsPVPELFFRKNWLRLTW |
| 8542 | VMLsPVPEVFFRKNWLRLTW |
| 8543 | VMQtPPYVKFFRKNWLRLTW |
| 8544 | VMQtPPYVKKFFRKNWLRLTW |
| 8545 | VPHHGFEDWsQIRFFRKNWLRLTW |
| 8546 | VPKSGRSSsLFFRKNWLRLTW |
| 8547 | VPKsPAFALFFRKNWLRLTW |
| 8548 | VPLIRKKsLFFRKNWLRLTW |
| 8549 | VPNAPPAYEKLsAEQSPPPYFFRKNWLRLTW |
| 8550 | VPREVLRLsFFFRKNWLRLTW |
| 8551 | VPREVLRLsLFFRKNWLRLTW |
| 8552 | VPREVLRLsMFFRKNWLRLTW |
| 8553 | VPREVLRLsVFFRKNWLRLTW |
| 8554 | VPRPERRsSLFFRKNWLRLTW |
| 8555 | VPRsPKHAHSSSFFFRKNWLRLTW |
| 8556 | VPRsPKHAHSSSLFFRKNWLRLTW |
| 8557 | VPRsPKHAHSSSMFFRKNWLRLTW |
| 8558 | VPRsPKHAHSSSVFFRKNWLRLTW |
| 8559 | VPStPKSSLFFRKNWLRLTW |
| 8560 | VPTsPKSSLFFRKNWLRLTW |
| 8561 | VPVsPGQQLFFRKNWLRLTW |
| 8562 | VRAsKDLAQFFRKNWLRLTW |
| 8563 | VRQsVTSFPDADAFHHQFFRKNWLRLTW |
| 8564 | VSKVMIGsPKKVFFRKNWLRLTW |
| 8565 | VSKVMIGsPKKYFFRKNWLRLTW |
| 8566 | VTQtPPYVKKFFRKNWLRLTW |
| 8567 | VTQtPPYVKYFFRKNWLRLTW |
| 8568 | WDsPGQEVLFFRKNWLRLTW |
| 8569 | VYTyIQSRFFFRKNWLRLTW |
| 8570 | WTHLsSKEVDPSFFRKNWLRLTW |
| 8571 | WTHLsSKEVDPSTGFFRKNWLRLTW |
| 8572 | YARsVHEEFFFRKNWLRLTW |
| 8573 | YAVPRRGsLFFRKNWLRLTW |
| 8574 | YAYDGKDyIFFRKNWLRLTW |
| 8575 | YEGsPIKVFFRKNWLRLTW |
| 8576 | YEKLsAEQSPPPFFRKNWLRLTW |
| 8577 | YFsPFRPYFFRKNWLRLTW |
| 8578 | yIQSRFFFRKNWLRLTW |
| 8579 | YLAsLEKKLFFRKNWLRLTW |
| 8580 | YLDsGIHSGFFRKNWLRLTW |
| 8581 | YLDsGIHsGAFFRKNWLRLTW |
| 8582 | YLDsGIHSGAFFRKNWLRLTW |
| 8583 | YLDsGIHsGVFFRKNWLRLTW |
| 8584 | YLDsGIHSGVFFRKNWLRLTW |
| 8585 | yLGLDVPVFFRKNWLRLTW |
| 8586 | YLGsISTLVTLFFRKNWLRLTW |
| 8587 | YLIHsPMSLFFRKNWLRLTW |
| 8588 | YLLsPLNTLFFRKNWLRLTW |
| 8589 | YLLsPTKLPSIFFRKNWLRLTW |
| 8590 | YLLsPTKLPSVFFRKNWLRLTW |
| 8591 | yLQSRYYRAFFRKNWLRLTW |
| 8592 | YLQsRYYRAFFRKNWLRLTW |
| 8593 | YLSDsDTEAKLFFRKNWLRLTW |
| 8594 | YMDsGIHsGAFFRKNWLRLTW |
| 8595 | YMDsGIHSGAFFRKNWLRLTW |
| 8596 | YMDsGIHsGVFFRKNWLRLTW |
| 8597 | YMDsGIHSGVFFRKNWLRLTW |
| 8598 | YPDPHsPFAVFFRKNWLRLTW |
| 8599 | YPGGRRsSLFFRKNWLRLTW |
| 8600 | YPLsPAKVNQYFFRKNWLRLTW |
| 8601 | YPLsPTKISEYFFRKNWLRLTW |
| 8602 | YPLsPTKISQYFFRKNWLRLTW |
| 8603 | YPRsEDEVEGVMFFRKNWLRLTW |
| 8604 | YPRsFDEVEGFFFRKNWLRLTW |
| 8605 | YPRsFDEVEGLFFRKNWLRLTW |
| 8606 | YPRsFDEVEGMFFRKNWLRLTW |
| 8607 | YPRsFDEVEGVFFRKNWLRLTW |
| 8608 | YPRsFDEVEGVFFFRKNWLRLTW |
| 8609 | YPRsFDEVEGVLFFRKNWLRLTW |
| 8610 | YPRsFDEVEGVMFFRKNWLRLTW |
| 8611 | YPRsFDEVEGWFFRKNWLRLTW |
| 8612 | YPSFRRsSLFFRKNWLRLTW |
| 8613 | YPSsPRKALFFRKNWLRLTW |
| 8614 | YPSsPRKFFFRKNWLRLTW |
| 8615 | YPSsPRKLFFRKNWLRLTW |
| 8616 | YPSsPRKMFFRKNWLRLTW |
| 8617 | YPSsPRKVFFRKNWLRLTW |
| 8618 | YPYEFsPVKMFFRKNWLRLTW |
| 8619 | YQLsPTKLPSIFFRKNWLRLTW |
| 8620 | YQLsPTKLPSVFFRKNWLRLTW |
| 8621 | YQRPFsPSAYFFRKNWLRLTW |
| 8622 | YQRsFDEVEGFFFRKNWLRLTW |
| 8623 | YQRsFDEVEGLFFRKNWLRLTW |
| 8624 | YQRsFDEVEGMFFRKNWLRLTW |
| 8625 | YQRsFDEVEGVFFRKNWLRLTW |
| 8626 | YQRsFDEVEGVFFFRKNWLRLTW |
| 8627 | YQRsFDEVEGVLFFRKNWLRLTW |
| 8628 | YQRsFDEVEGVMFFRKNWLRLTW |
| 8629 | YQRsFDEVEGWFFRKNWLRLTW |
| 8630 | YRYsPQSFLFFRKNWLRLTW |
| 8631 | YTAGtPYKVFFRKNWLRLTW |
| 8632 | YYTAGSSsPTHAKSAHVFFRKNWLRLTW |
| 8810 | RLLsAAENFLFFRKNWLRLTW |

Lowercase s, t, and y indicate phosphorylated serine, phosphorylated threonine, and phosphorylated tyrosine, respectively.
Lowercase c indicates that the cysteine is present in a cysteine-cysteine disulfide bond.
Lowercase m indicates oxidized methionine.
(AcS) indicates an N-terminally acetylated serine.
(sLss) indicates that at least one serine residue in the amino acid sequence SLSS is phosphorylated.
(sPs) indicates that at least one serine residue in the amino acid sequence SPS is phosphorylated.

TABLE 6
Amino acid sequences of exemplary
antigenic polypeptides

| SEQ | |
|---|---|
| ID | |
| NO | Amino Acid Sequence |
| 8633 | ALTtsAHSVFFRKNLLRLTG |
| 8634 | ALTtSAHSVFFRKNLLRLTG |
| 8635 | ALTTsAHSVFFRKNLLRLTG |
| 8636 | APP(sts)AAALFFRKNLLRLTG |
| 8637 | APPsTSAAALFFRKNLLRLTG |
| 8638 | APPsTsAAALFFRKNLLRLTG |
| 8639 | APPStSAAALFFRKNLLRLTG |
| 8640 | APPSTsAAALFFRKNLLRLTG |
| 8641 | APPstSAAALFFRKNLLRLTG |
| 8642 | APPStsAAALFFRKNLLRLTG |
| 8643 | APP<s>TSAAALFFRKNLLRLTG |
| 8644 | APPS<t>SAAALFFRKNLLRLTG |
| 8645 | APPST<s>AAALFFRKNLLRLTG |
| 8646 | APPS<t>sAAALFFRKNLLRLTG |
| 8647 | APP<s><t>SAAALFFRKNLLRLTG |
| 8648 | APP<s>T<s>AAALFFRKNLLRLTG |
| 8649 | APPS<t><s>AAALFFRKNLLRLTG |
| 8650 | APRG<n>VISLFFRKNLLRLIG |
| 8651 | APRtNGVAMFFRKNLLRLTG |
| 8652 | APTsAAALFFRKNLLRLTG |
| 8653 | APTsASNVMFFRKNLLRLTG |
| 8654 | APTSAsNVMFFRKNLLRLTG |
| 8655 | APVsASASVFFRKNLLRLTG |
| 8656 | APVsSKSSLFFRKNLLRLTG |
| 8657 | EP(sst)VVSLFFRKNLLRLTG |
| 8658 | EPsSTVVSLFFRKNLLRLTG |
| 8659 | EPSsTVVSLFFRKNLLRLTG |
| 8660 | EPSStVVSLFFRKNLLRLTG |
| 8661 | GLSsLAEEAAFFRKNLLRLTG |
| 8662 | HP(sss)AAVLFFRKNLLRLTG⁽ⁱ⁾ |
| 8663 | HP(sst)ASTALFFRKNLLRLTG |
| 8664 | HPMsTASQVFFRKNLLRLTG |
| 8665 | HPssTAAVLFFRKNLLRLTG |
| 8666 | HPsStAAVLFFRKNLLRLTG |
| 8667 | HPSstAAVLFFRKNLLRLTG |
| 8668 | HPsSTASTALFFRKNLLRLTG |
| 8669 | HPSsTASTALFFRKNLLRLTG |
| 8670 | HPSStASTALFFRKNLLRLTG |
| 8671 | HPTtVASYFFRKNLLRLTG |
| 8672 | IPIsLHTSLFFRKNLLRLTG |
| 8673 | IPTsSVLSLFFRKNLLRLTG |
| 8674 | IPVsKPLSLFFRKNLLRLTG |
| 8675 | IPV<s>KPLSLFFRKNLLRLTG |
| 8676 | IPVsSHNSLFFRKNLLRLTG |
| 8677 | IPVssHNSLFFRKNLLRLTG |
| 8678 | IPV<s>SHNSLFFRKNLLRLTG |
| 8679 | IPV[s]SHNSLFFRKNLLRLTG |
| 8680 | KPPtSQSSVLFFRKNLLRLTG |
| 8681 | KPP<t>SQSSVLFFRKNLLRLTG |
| 8682 | KPPTsQSSVLFFRKNLLRLTG |
| 8683 | KPPT<s>QSSVLFFRKNLLRLTG |
| 8684 | KPPV<s>FFSLFFRKNLLRLIG |
| 8685 | KPTLY<n>VSLFFRKNLLRLIG |
| 8686 | LPRN(st)MMFFRKNLLRLTG |
| 8687 | LPRNstMMFFRKNLLRLTG |
| 8688 | LPTsLPSSLFFRKNLLRLTG |
| 8689 | MPVRPT<t>NTFFFRKNLLRLTG |
| 8690 | (diMe)MPVRPT<t>NTFFFRKNLL |
| | RLTG |
| 8691 | MPVtSSSFFFFRKNLLRLTG |
| 8692 | NPVsLPSLFFRKNLLRLTG |
| 8693 | PPS<t>SAAALFFRKNLLRLTG |
| 8694 | PPST<s>AAALFFRKNLLRLIG |
| 8695 | RPP(sss)QQLFFRKNLLRLTG |
| 8696 | RPPItQSSLFFRKNLLRLTG |
| 8697 | (Me)RPPItQSSLFFRKNLLRLTG |
| 8698 | (diME)RPPItQSSLFFRKNLLRLT |
| | G |
| 8699 | (diME)RPPI[t]QSSLFFRKNLLR |
| | LTG |
| 8700 | RPPQ<s>SSVSLFFRKNLLRLTG |
| 8701 | RPPsSSQQLFFRKNLLRLTG |
| 8702 | RPPSsSQQLFFRKNLLRLTG |
| 8703 | RPPSSsQQLFFRKNLLRLTG |
| 8704 | RPPVtKASSFFFRKNLLRLTG |
| 8705 | RPVtASITTMFFRKNLLRLTG |
| 8706 | TPASsRAQTLFFRKNLLRLTG |
| 8707 | TPAsSSSALFFRKNLLRLTG |
| 8708 | TPIsQAQKLFFRKNLLRLTG |
| 8709 | TPVsSANMMFFRKNLLRLTG |
| 8710 | VLTsNVQTIFFRKNLLRLTG |
| 8711 | VPAsSTSTLFFRKNLLRLTG |
| 8712 | VPAtHGQVTYFFRKNLLRLTG |
| 8713 | VPtTSSSLFFRKNLLRLTG |
| 8714 | VPTtSSSLFFRKNLLRLTG |
| 8715 | VPTTsSSLFFRKNLLRLTG |
| 8716 | VPVsGTQGLFFRKNLLRLTG |
| 8717 | VPVsNQSSLFFRKNLLRLTG |
| 8718 | VPVsSASELFFRKNLLRLTG |
| 8719 | VPVsVGPSLFFRKNLLRLTG |

Lowercase s and t indicate O-GlcNAcylated serine and O-GlcNAcylated threonine, respectively.
(sts), (sss), (ts), (sst), and (st) indicates at least one of the serine or threonine residues is modified with O-GlcNAc.
⁽ⁱ⁾indicates that two GlcNAc moeities were detected, but could not be assigned to specific amino acids.
(Me) indicates methylation of the following arginine.
(diMe) indicates asymmetric di-methylation of the following arginine.
<n> indicates hexose-GlcNAcylated asparagine.
<s> indicates hexose-GlcNAcylated serine.
<t> indicates hexose-GlcNAcylated threonine.
[s] indicates acetyl-GlcNAcylated serine.
[t] indicates acetyl-GlcNAcylated threonine.

TABLE 7
Amino acid sequences of exemplary
antigenic polypeptides

| SEQ | |
|---|---|
| ID | |
| NO | Amino Acid Sequence |
| 8720 | ALTtsAHSVFFRKNWLRLTW |
| 8721 | ALTtSAHSVFFRKNWLRLTW |
| 8722 | ALTTsAHSVFFRKNWLRLTW |
| 8723 | APP(sts)AAALFFRKNWLRLTW |
| 8724 | APPsTSAAALFFRKNWLRLTW |
| 8725 | APPsTsAAALFFRKNWLRLTW |
| 8726 | APPStSAAALFFRKNWLRLTW |
| 8727 | APPSTsAAALFFRKNWLRLTW |
| 8728 | APPstSAAALFFRKNWLRLTW |
| 8729 | APPStsAAALFFRKNWLRLTW |
| 8730 | APP<s>TSAAALFFRKNWLRLTW |
| 8731 | APPS<t>SAAALFFRKNWLRLTW |
| 8732 | APPST<s>AAALFFRKNWLRLTW |
| 8733 | APPS<t>sAAALFFRKNWLRLTW |
| 8734 | APP<s><t>SAAALFFRKNWLRLTW |
| 8735 | APP<s>T<s>AAALFFRKNWLRLTW |
| 8736 | APPS<t><s>AAALFFRKNWLRLTW |
| 8737 | APRG<n>VISLFFRKNWLRLTW |
| 8738 | APRtNGVAMFFRKNWLRLTW |
| 8739 | APTsAAALFFRKNWLRLTW |
| 8740 | APTsASNVMFFRKNWLRLTW |
| 8741 | APTSAsNVMFFRKNWLRLTW |
| 8742 | APVsASASVFFRKNWLRLTW |
| 8743 | APVsSKSSLFFRKNWLRLTW |
| 8744 | EP(sst)VVSLFFRKNWLRLTW |
| 8745 | EPsSTVVSLFFRKNWLRLTW |
| 8746 | EPSsTVVSLFFRKNWLRLTW |
| 8747 | EPSStVVSLFFRKNWLRLTW |
| 8748 | GLSsLAEEAAFFRKNWLRLTW |
| 8749 | HP(sss)AAVLFFRKNWLRLTW⁽ⁱ⁾ |
| 8750 | HP(sst)ASTALFFRKNWLRLTW |
| 8751 | HPMsTASQVFFRKNWLRLTW |
| 8752 | HPssTAAVLFFRKNWLRLTW |
| 8753 | HPsStAAVLFFRKNWLRLTW |
| 8754 | HPSstAAVLFFRKNWLRLTW |
| 8755 | HPsSTASTALFFRKNWLRLTW |
| 8756 | HPSsTASTALFFRKNWLRLTW |
| 8757 | HPSStASTALFFRKNWLRLTW |
| 8758 | HPTtVASYFFRKNWLRLTW |
| 8759 | IPIsLHTSLFFRKNWLRLTW |
| 8760 | IPTsSVLSLFFRKNWLRLTW |
| 8761 | IPVsKPLSLFFRKNWLRLTW |
| 8762 | IPV<s>KPLSLFFRKNWLRLTW |
| 8763 | IPVsSHNSLFFRKNWLRLTW |
| 8764 | IPVssHNSLFFRKNWLRLTW |
| 8765 | IPV<s>SHNSLFFRKNWLRLTW |
| 8766 | IPV[s]SHNSLFFRKNWLRLTW |
| 8767 | KPPtSQSSVLFFRKNWLRLTW |
| 8768 | KPP<t>SQSSVLFFRKNWLRLTW |
| 8769 | KPPTsQSSVLFFRKNWLRLTW |
| 8770 | KPPT<s>QSSVLFFRKNWLRLTW |
| 8771 | KPPV<s>FFSLFFRKNWLRLTW |
| 8772 | KPTLY<n>VSLFFRKNWLRLTW |
| 8773 | LPRN(st)MMFFRKNWLRLTW |
| 8774 | LPRNstMMFFRKNWLRLTW |
| 8775 | LPTsLPSSLFFRKNWLRLTW |
| 8776 | MPVRPT<t>NIFFFRKNWLRLTW |
| 8777 | (diMe)MPVRPT<t>NIFFFRKNW |
| | LRLTW |
| 8778 | MPVtSSSFFFFRKNWLRLTW |
| 8779 | NPVsLPSLFFRKNWLRLTW |
| 8780 | PPS<t>SAAALFFRKNWLRLTW |
| 8781 | PPST<s>AAALFFRKNWLRLTW |
| 8782 | RPP(sss)QQLFFRKNWLRLTW |
| 8783 | RPPItQSSLFFRKNWLRLTW |
| 8784 | (Me)RPPItQSSLFFRKNWLRLTW |
| 8785 | (diME)RPPItQSSLFFRKNWLRLT |
| | W |
| 8786 | (diME)RPPI[t]QSSLFFRKNWLR |
| | LTW |
| 8787 | RPPQ<s>SSVSLFFRKNWLRLTW |
| 8788 | RPPsSSQQLFFRKNWLRLTW |
| 8789 | RPPSsSQQLFFRKNWLRLTW |
| 8790 | RPPSSsQQLFFRKNWLRLTW |
| 8791 | RPPVtKASSFFFRKNWLRLTW |
| 8792 | RPVtASITTMFFRKNWLRLTW |
| 8793 | TPASsRAQTLFFRKNWLRLTW |
| 8794 | TPAsSSSALFFRKNWLRLTW |
| 8795 | TPIsQAQKLFFRKNWLRLTW |
| 8796 | TPVsSANMMFFRKNWLRLTW |
| 8797 | VLTsNVQTIFFRKNWLRLTW |
| 8798 | VPAsSTSTLFFRKNWLRLTW |
| 8799 | VPAtHGQVTYFFRKNWLRLTW |
| 8800 | VPtTSSSLFFRKNWLRLTW |
| 8801 | VPTtSSSLFFRKNWLRLTW |
| 8802 | VPTTsSSLFFRKNWLRLTW |
| 8803 | VPVsGTQGLFFRKNWLRLTW |
| 8804 | VPVsNQSSLFFRKNWLRLTW |
| 8805 | VPVsSASELFFRKNWLRLTW |
| 8806 | VPVsVGPSLFFRKNWLRLTW |

Lowercase s and t indicate O-GlcNAcylated serine and O-GlcNAcylated threonine, respectively.
(sts), (sss), (ts), (sst), and (st) indicates at least one of the serine or threonine residues is modified with O-GlcNAc.
⁽ⁱ⁾indicates that two GlcNAc moeities were detected, but could not be assigned to specific amino acids.
(Me) indicates methylation of the following arginine.
(diMe) indicates asymmetric di-methylation of the following arginine.
<n> indicates hexose-GlcNAcylated asparagine.
<s> indicates hexose-GlcNAcylated serine.
<t> indicates hexose-GlcNAcylated threonine.
[s] indicates acetyl-GlcNAcylated serine.
[t] indicates acetyl-GlcNAcylated threonine.

[0024] In certain embodiments, the instant disclosure provides: an antigenic polypeptide comprising an MHC-binding peptide comprising an amino acid sequence selected from the group consisting of SEQ ID NOs: 98-3000 and 8808; and an HSP-binding peptide comprising the amino acid sequence of X₁X₂X₃X₄X₅X₆X₇ (SEQ ID NO: 1), wherein X₁ is omitted, N, F, or Q; X₂ is W, L, or F; X₃ is L or I; X₄ is R, L, or K; X₅ is L, W, or I; X₆ is T, L, F, K, R, or W; and X₇ is W, G, K, or F.

[0025] In certain embodiments, the HSP-binding peptide comprises the amino acid sequence of:
[0026] (a) X₁LX₂LTX₃ (SEQ ID NO: 2), wherein X₁ is W or F; X₂ is R or K; and X₃ is W, F, or G;
[0027] (b) NX₁LX₂LTX₃ (SEQ ID NO: 3), wherein X₁ is W or F; X₂ is R or K; and X₃ is W, F, or G;
[0028] (c) WLX₁LTX₂ (SEQ ID NO: 4), wherein X₁ is R or K; and X₂ is W or G;
[0029] (d) NWLX₁LTX₂ (SEQ ID NO: 5), wherein X₁ is R or K; and X₂ is W or G; or
[0030] (e) NWX₁X₂X₃X₄X₅ (SEQ ID NO: 6), wherein X₁ is L or I; X₂ is L, R, or K; X₃ is L or I; X₄ is T, L, F, K, R, or W; and X₅ is W or K.

[0031] In certain embodiments, the instant disclosure provides: an antigenic polypeptide comprising an WIC-binding peptide comprising an amino acid sequence selected from the group consisting of SEQ ID NOs: 98-3000 and 8808, optionally wherein the amino acid sequence of the WIC-binding peptide consists of an amino acid sequence selected from the group consisting of SEQ ID NOs: 98-3000 and 8808; and an HSP-binding peptide comprising an amino acid sequence selected from the group consisting of SEQ ID NOs: 1-42, optionally wherein the amino acid sequence of the HSP-binding peptide consists of an amino acid sequence selected from the group consisting of SEQ ID NOs: 1-42.

[0032] In certain embodiments, the C-terminus of the WIC-binding peptide is linked (either directly or indirectly) to the N-terminus of the HSP-binding peptide. Accordingly, in certain embodiments, the antigenic polypeptide comprises an MHC-binding peptide comprising an amino acid sequence selected from the group consisting of SEQ ID NOs: 98-3000 and 8808, and an HSP-binding peptide comprising an amino acid sequence selected from the group consisting of SEQ ID NOs: 1-42, wherein the C-terminus of the MHC-binding peptide is linked (either directly or indirectly) to the N-terminus of the HSP-binding peptide.

[0033] In certain embodiments, the N-terminus of the MHC-binding peptide is linked (either directly or indirectly) to the C-terminus of the HSP-binding peptide. Accordingly, in certain embodiments, the antigenic polypeptide comprises an MHC-binding peptide comprising an amino acid sequence selected from the group consisting of SEQ ID NOs: 98-3000 and 8808, and an HSP-binding peptide comprising an amino acid sequence selected from the group consisting of SEQ ID NOs: 1-42, wherein the N-terminus of the WIC-binding peptide is linked (either directly or indirectly) to the C-terminus of the HSP-binding peptide.

[0034] In certain embodiments, the MHC-binding peptide is 8 to 50 amino acids in length, optionally 8, 9, 10, 11, 12, 13, 14, 15, 16, 17, 18, 19, 20, 21, 22, 23, 24, 25, 26, 27, 28, 29, 30, 31, 32, 33, 34, 35, 36, 37, 38, 39, 40, 41, 42, 43, 44, 45, 46, 47, 48, 49, or 50 amino acids in length.

[0035] In certain embodiments, the HSP-binding peptide is 6, 7, 8, 9, 10, 11, 12, 13, 14, 15, 16, 17, 18, 19, 20, 21, 22, 23, 24, 25, 26, 27, 28, 29, 30, 31, 32, 33, 34, 35, 36, 37, 38, 39, 40, 41, 42, 43, 44, 45, 46, 47, 48, 49, or 50 amino acids in length. In certain embodiments, the HSP-binding peptide is less than 7, 8, 9, 10, 11, 12, 13, 14, 15, 16, 17, 18, 19, 20, 21, 22, 23, 24, 25, 26, 27, 28, 29, 30, 31, 32, 33, 34, 35, 36, 37, 38, 39, 40, 41, 42, 43, 44, 45, 46, 47, 48, 49, or 50 amino acids in length.

[0036] In certain embodiments, the HSP-binding peptide is linked to the MHC-binding peptide via a chemical linker. Any chemical linkers can be employed to link the HSP-binding peptide and the WIC-binding peptide. Exemplary chemical linkers include moieties generated from chemical crosslinking (see, e.g., Wong, 1991, Chemistry of Protein Conjugation and Cross-Linking, CRC Press, incorporated herein by reference in its entirety), UV crosslinking, and click chemistry reactions (see, e.g., U.S. Patent Publication 20130266512, which is incorporated by reference herein in its entirety).

[0037] In certain embodiments, the HSP-binding peptide is linked to the MHC-binding peptide via a peptide linker (e.g., a peptide linker as disclosed herein). In certain embodiments, the peptide linker comprises the amino acid sequence of SEQ ID NO: 43 or FR. In certain embodiments, the amino acid sequence of the peptide linker consists of the amino acid sequence of SEQ ID NO: 43 or FR.

[0038] In certain embodiments, the C-terminus of the MHC-binding peptide is linked by the peptide linker of SEQ ID NO: 43 or FR to the N-terminus of the HSP-binding peptide. Accordingly, in certain embodiments, the antigenic polypeptide comprises from N-terminus to C-terminus: an MHC-binding peptide comprising an amino acid sequence selected from the group consisting of SEQ ID NOs: 98-3000 and 8808; the peptide linker of SEQ ID NO: 43 or FR; and an HSP-binding peptide comprising an amino acid sequence selected from the group consisting of SEQ ID NOs: 1-42. In certain embodiments, the amino acid sequence of the WIC-binding peptide consists of an amino acid sequence selected from the group consisting of SEQ ID NOs: 98-3000 and 8808, and the amino acid sequence of the HSP-binding peptide consists of an amino acid sequence selected from the group consisting of SEQ ID NOs: 1-42.

[0039] In certain embodiments, the antigenic polypeptide comprises an amino acid sequence selected from the group consisting of SEQ ID NOs: 3001-8806, 8809, and 8810. In certain embodiments, the amino acid sequence of the antigenic polypeptide consists of an amino acid sequence selected from the group consisting of SEQ ID NOs: 3001-8806, 8809, and 8810. In certain embodiments, the antigenic polypeptide consists of an amino acid sequence selected from the group consisting of SEQ ID NOs: 3001-8806, 8809, and 8810.

[0040] In certain embodiments, the N-terminus of the MHC-binding peptide is linked by the peptide linker of SEQ ID NO: 43 or FR to the C-terminus of the HSP-binding peptide. Accordingly, in certain embodiments the antigenic polypeptide comprises from N-terminus to C-terminus: an HSP-binding peptide comprising an amino acid sequence selected from the group consisting of SEQ ID NOs: 1-42; the peptide linker of SEQ ID NO: 43 or FR; and an WIC-binding peptide comprising an amino acid sequence selected from the group consisting of SEQ ID NOs: 98-3000 and 8808. In certain embodiments, the amino acid sequence of the MHC-binding peptide consists of an amino acid sequence selected from the group consisting of SEQ ID NOs: 98-3000 and 8808, and the amino acid sequence of the HSP-binding peptide consists of an amino acid sequence selected from the group consisting of SEQ ID NOs: 1-42.

[0041] In certain embodiments, the antigenic polypeptide comprises an MHC-binding peptide comprising an amino acid sequence selected from the group consisting of SEQ ID NOs: 98-3000 and 8808, and wherein the N-terminus of the MHC-binding peptide is linked to the C-terminus of an amino acid sequence selected from the group consisting of SEQ ID NOs: 74-97. In certain embodiments, the amino acid sequence of the MHC-binding peptide consists of an amino acid sequence selected from the group consisting of SEQ ID NOs: 98-3000 and 8808.

[0042] In certain embodiments, the antigenic polypeptide comprises an MHC-binding peptide comprising an amino acid sequence selected from the group consisting of SEQ ID NOs: 98-3000 and 8808, and wherein the C-terminus of the WIC-binding peptide is linked to the N-terminus of an amino acid sequence selected from the group consisting of SEQ ID NOs: 50-67. In certain embodiments, the amino acid sequence of the MHC-binding peptide consists of an amino acid sequence selected from the group consisting of SEQ ID NOs: 98-3000 and 8808.

[0043] In certain embodiments, the antigenic peptides disclosed herein are 8 to 100 amino acids, (e.g., 8, 9, 10, 11, 12, 13, 14, 15, 16, 17, 18, 19, 20, 21, 22, 23, 24, 25, 26, 27, 28, 29, 30, 31, 32, 33, 34, 35, 36, 37, 38, 39, 40, 41, 42, 43, 44, 45, 46, 47, 48, 49, 50, 51, 52, 53, 54, 55, 56, 57, 58, 59, 60, 61, 62, 63, 64, 65, 66, 67, 68, 69, 70, 71, 72, 73, 74, 75, 76, 77, 78, 79, 80, 81, 82, 83, 84, 85, 86, 87, 88, 89, 90, 91, 92, 93, 94, 95, 96, 97, 98, 99, or 100 amino acids) in length. In certain embodiments, an antigenic peptide is 8 to 50 amino acids in length.

[0044] In certain embodiments, the antigenic peptides disclosed herein are less than 9, 10, 11, 12, 13, 14, 15, 16, 17, 18, 19, 20, 21, 22, 23, 24, 25, 26, 27, 28, 29, 30, 31, 32, 33, 34, 35, 36, 37, 38, 39, 40, 41, 42, 43, 44, 45, 46, 47, 48, 49, 50, 51, 52, 53, 54, 55, 56, 57, 58, 59, 60, 61, 62, 63, 64, 65, 66, 67, 68, 69, 70, 71, 72, 73, 74, 75, 76, 77, 78, 79, 80, 81, 82, 83, 84, 85, 86, 87, 88, 89, 90, 91, 92, 93, 94, 95, 96, 97, 98, 99, or 100 amino acids in length.

[0045] In certain embodiments, the amino acid sequence of the antigenic polypeptides disclosed herein does not comprise more than 8, 9, 10, 11, 12, 13, 14, 15, 16, 17, 18, 19, 20, 21, 22, 23, 24, 25, 26, 27, 28, 29, 30, 31, 32, 33, 34, 35, 36, 37, 38, 39, 40, 41, 42, 43, 44, 45, 46, 47, 48, 49, 50, 51, 52, 53, 54, 55, 56, 57, 58, 59, 60, 61, 62, 63, 64, 65, 66, 67, 68, 69, 70, 71, 72, 73, 74, 75, 76, 77, 78, 79, 80, 81, 82, 83, 84, 85, 86, 87, 88, 89, 90, 91, 92, 93, 94, 95, 96, 97, 98, 99, or 100 contiguous amino acids of a protein (e.g., a naturally occurring protein) that comprises an amino acid sequence selected from the group consisting of SEQ ID NO: 98-3000 and 8808.

[0046] In certain embodiments, the instant disclosure provides a polypeptide comprising an amino acid sequence selected from the group consisting of SEQ ID NOs: 3001-8806, 8809, and 8810. In certain embodiments, the polypeptide is 15 to 100 amino acids in length, optionally, 9, 10, 11, 12, 13, 14, 15, 16, 17, 18, 19, 20, 21, 22, 23, 24, 25, 26, 27, 28, 29, 30, 31, 32, 33, 34, 35, 36, 37, 38, 39, 40, 41, 42, 43, 44, 45, 46, 47, 48, 49, 50, 51, 52, 53, 54, 55, 56, 57, 58, 59, 60, 61, 62, 63, 64, 65, 66, 67, 68, 69, 70, 71, 72, 73, 74, 75, 76, 77, 78, 79, 80, 81, 82, 83, 84, 85, 86, 87, 88, 89, 90, 91, 92, 93, 94, 95, 96, 97, 98, 99, or 100 amino acids in length. In certain embodiments, the amino acid sequence of the antigenic polypeptide consists of an amino acid sequence selected from the group consisting of SEQ ID NOs: 3001-8806, 8809, and 8810.

[0047] The antigenic polypeptide disclosed herein can comprise one or more MHC-binding peptides. In certain embodiments, the antigenic peptide comprises one MHC-binding peptides. In certain embodiments, the antigenic polypeptide comprises two or more (e.g., 3, 4, 5, 6, 7, 8, 9, 10, or more) MHC-binding peptides. The two or more MHC-binding peptides can be linked via a chemical linker or a peptide linker, wherein the peptide linker optionally comprises an amino acid sequence that can be recognized and/or cleaved by a protease.

[0048] The skilled worker will appreciate that the antigenic polypeptides disclosed herein also encompass derivatives of antigenic polypeptides that are modified during or after synthesis. Such modifications include, but are not limited to: glycosylation, acetylation, methylation, phosphorylation (e.g., phosphorylation of Tyr, Ser, Thr, Arg, Lys, or His on a side chain hydroxyl or amine), formylation, or amidation (e.g., amidation of a C-terminal carboxyl group); derivatization using reactive chemical groups (e.g., derivatization of: free NH₂, COOH, or OH groups); specific chemical cleavage (e.g., by cyanogen bromide, hydroxylamine, BNPS-Skatole, acid, NaBH₄, or alkali hydrolysis); enzymatic cleavage (e.g., by trypsin, chymotrypsin, papain, V8 protease; oxidation; reduction; etc. Methods for effecting the foregoing modification to antigenic polypeptides are well known in the art.

[0049] In certain embodiments, the antigenic polypeptide comprises one or more modified amino acid residues (e.g., in the MHC-binding peptide portion of the antigenic polypeptide). In certain embodiments, the antigenic polypeptide comprises a phosphorylated residue (e.g., a Tyr, Ser, Thr, Arg, Lys, or His that has been phosphorylated on a side chain hydroxyl or amine). In certain embodiments, the antigenic polypeptide comprises a phosphomimetic residue (e.g., a mimetic of a Tyr, Ser, Thr, Arg, Lys, or His amino acid that has been phosphorylated on a side chain hydroxyl or amine). Non-limiting examples of phosphomimetic groups include O-boranophospho, borono, O-dithiophospho, phosphoramide, H-phosphonate, alkylphosphonate, phosphorothioate, phosphodithioate and phosphorofluoridate, any of which may be derivatized on Tyr, Thr, Ser, Arg, Lys, or His residues. In certain embodiments, an Asp or Glu residue is used as a phosphomimetic in place of a phospho-Tyr, phospho-Thr, phospho-Ser, phospho-Arg, phospho-Lys and/or phospho-His residue in a peptide. In certain embodiments, the phosphomimetic residue is a non-hydrolyzable analogue of a phosphorylated residue. Accordingly, in certain embodiments, the antigenic polypeptide comprises a phosphopeptide selected from the group consisting of SEQ ID NOs: 98-3000 and 8808, wherein a phosphorylated amino acid residue of the phosphopeptide is replaced by a non-hydrolyzable mimetic of the phosphorylated amino acid residue.

[0050] The skilled worker will further appreciate that, in certain embodiments, the antigenic polypeptides disclosed herein can comprise one or more natural and/or non-natural amino acids (e.g., D-amino acids), and amino acid analogues and derivatives (e.g., disubstituted amino acids, N-alkyl amino acids, lactic acid, 4-hydroxyproline, γ-carboxyglutamate, ε-N,N,N-trimethyllysine, ε-N-acetyllysine, 0-phosphoserine, N-acetylserine, N-formylmethionine, 3-methylhistidine, 5-hydroxylysine, σ-N-methylarginine). In certain embodiments, the antigenic polypeptides disclosed herein comprise one or more retro-inverso peptides. A “retro-inverso peptide” refers to a peptide with a reversal of the peptide sequence in two or more positions and inversion of the stereochemistry from L to D configuration in chiral amino acids. Thus, a retro-inverso peptide has reversed termini, reversed direction of peptide bonds, and reversed peptide sequence from N-to-C-terminus, while approximately maintaining the topology of the side chains as in the native peptide sequence. Synthesis of retro-inverso peptide analogues are described in Bonelli, F. et al., Int J Pept Protein Res. 24(6):553-6 (1984); Verdini, A and Viscomi, G. C, J. Chem. Soc. Perkin Trans. 1:697-701 (1985); and U.S. Pat. No. 6,261,569, which are incorporated herein in their entirety by reference.

### 6.2.1 Production of Antigenic Polypeptides by Chemical Synthesis

[0051] Antigenic polypeptides disclosed herein can be synthesized by standard chemical methods including the use of a peptide synthesizer. Conventional peptide synthesis or other synthetic protocols well known in the art can be used.

[0052] In certain embodiments, the polypeptide disclosed herein consists of amino acid residues (natural or non-natural) linked by peptide bonds. Such polypeptides can be synthesized, for example, by solid-phase peptide synthesis using procedures similar to those described by Merrifield, 1963, J. Am. Chem. Soc., 85:2149, incorporated herein by reference in its entirety. During synthesis, N-α-protected amino acids having protected side chains are added stepwise to a growing polypeptide chain linked by its C-terminal end to an insoluble polymeric support i.e., polystyrene beads. The polypeptides are synthesized by linking an amino group of an N-α-deprotected amino acid to an α-carboxyl group of an N-α-protected amino acid that has been activated by reacting it with a reagent such as dicyclohexylcarbodiimide or 2-(6-Chloro-1-H-benzotriazole-1-yl)-1,1,3,3-tetramethylaminium hexafluorophosphate. The attachment of a free amino group to the activated carboxyl leads to peptide bond formation. The most commonly used N-α-protecting groups include Boc which is acid labile and Fmoc which is base labile. Details of appropriate chemistries, resins, protecting groups, protected amino acids and reagents are well known in the art (See, Atherton, et al., 1989, Solid Phase Peptide Synthesis: A Practical Approach, IRL Press, and Bodanszky, 1993, Peptide Chemistry, A Practical Textbook, 2nd Ed., Springer-Verlag, each of which is incorporated herein by reference in its entirety).

[0053] In addition, analogs and derivatives of polypeptides can be chemically synthesized as described supra. If desired, nonclassical amino acids or chemical amino acid analogs can be introduced as a substitution or addition into the peptide sequence. Non-classical amino acids include, but are not limited to, the D-isomers of the common amino acids, α-amino isobutyric acid, 4-aminobutyric acid, hydroxyproline, sarcosine, citrulline, cysteic acid, t-butylglycine, t-butylalanine, phenylglycine, cyclohexylalanine, β-alanine, designer amino acids such as β-methyl amino acids, C-α-methyl amino acids, and N-α-methyl amino acids.

[0054] Polypeptides phosphorylated on the side chains of Tyr, Ser, Thr, Arg, Lys, and His can be synthesized in Fmoc solid phase synthesis using the appropriate side chain protected Fmoc-phospho amino acid. In this way, polypeptides with a combination of phosphorylated and non-phosphorylated Tyr, Ser, Thr, Arg, Lys, and His residues can be synthesized. For example, the method of Staerkaer et al can be applied (1991, Tetrahedron Letters 32: 5389-5392). Other procedures (some for specific amino acids) are detailed in De Bont et al. (1987, Tray. Chim Pays Bas 106: 641, 642), Bannwarth and Trezeciak (1987, Helv. Chim. Acta 70: 175-186), Perich and Johns (1988, Tetrahedron Letters 29: 2369-2372), Kitas et al. (1990, J. Org. Chem. 55:4181-4187), Valerio et al. (1989, Int. J. Peptide Protein Res. 33:428-438), Perich et al. (1991, Tetrahedron Letters 32:4033-4034), Pennington (1994, Meth. Molec. Biol. 35:195-2), and Perich (1997, Methods Enzymol. 289:245-266, Chan et al. (2000, White, Fmoc Solid Phase Peptide Synthesis: A Practical Approach, Oxford University Press), Graham et al. (1999, Org. Lett., Vol. 1, No. 5), Russell et al., (2008 Org. Biomol. Chem. (2008, Sep. 21; 6(18):3270-5), each of which is incorporated herein by reference in its entirety).

[0055] A phosphorylated polypeptide can also be produced by first culturing a cell transformed with a nucleic acid that encodes the amino acid sequence of the polypeptide. After producing such a polypeptide by cell culture, the hydroxyl groups of the appropriate amino acid are substituted by phosphate groups using organic synthesis or enzymatic methods with phosphorylation enzymes. For example, in the case of serine-specific phosphorylation, serine kinases can be used.

[0056] Phosphopeptide mimetics can also be synthesized, wherein a phosphorylated amino acid residue in a polypeptide is replaced with a phosphomimetic group. Non-limiting examples of phosphomimetic groups include O-boranophospho, borono, O-dithiophospho, phosphoramide, H-phosphonate, alkylphosphonate, phosphorothioate, phosphodithioate and phosphorofluoridate, any of which may be derivatized on Tyr, Thr, Ser, Arg, Lys, or His residues. In certain embodiments, an Asp or Glu residue is used as a phosphomimetic. Asp or Glu residues can also function as phosphomimetic groups, and be used in place of a phospho-Tyr, phospho-Thr, phospho-Ser, phospho-Arg, phospho-Lys and/or phospho-His residue in a peptide.

[0057] Purification of the resulting peptide is accomplished using conventional procedures, such as preparative HPLC using reverse-phase, gel permeation, partition and/or ion exchange chromatography. The choice of appropriate matrices and buffers are well known in the art and so are not described in detail herein.

### 6.2.2 Production of Antigenic Polypeptides Using Recombinant DNA Technology

[0058] Polypeptides disclosed herein can also be prepared by recombinant DNA methods known in the art. A nucleic acid sequence encoding a polypeptide can be obtained by back translation of the amino acid sequence and synthesized by standard chemical methods, such as the use of an oligonucleotide synthesizer. Alternatively, coding information for polypeptides can be obtained from DNA templates using specifically designed oligonucleotide primers and PCR methodologies. Variations and fragments of the polypeptides can be made by substitutions, insertions or deletions that provide for functionally equivalent molecules. Due to the degeneracy of nucleotide coding sequences, DNA sequences which encode the same or a variant of a polypeptide may be used in the practice of the present invention. These include, but are not limited to, nucleotide sequences which are altered by the substitution of different codons that encode a functionally equivalent amino acid residue within the sequence, thus producing a silent or conservative change. The nucleic acid encoding a polypeptide can be inserted into an expression vector for propagation and expression in host cells.

[0059] As the coding sequence for peptides of the length contemplated herein can be synthesized by chemical techniques, for example, the phosphotriester method of Matteucci et al., J. Am. Chem. Soc. 103:3185 (1981) (incorporated herein by reference in its entirety), modification can be made simply by substituting the appropriate base(s) for those encoding the native peptide sequence. The coding sequence can then be provided with appropriate linkers and ligated into expression vectors commonly available in the art, and the vectors used to transform suitable hosts to produce the desired peptide or fusion protein. A number of such vectors and suitable host systems are now available. For expression of the peptide or fusion proteins, the coding sequence will be provided with operably linked start and stop codons, promoter and terminator regions and usually a replication system to provide an expression vector for expression in the desired cellular host.

[0060] An expression construct refers to a nucleotide sequence encoding a polypeptide operably linked with one or more regulatory regions which enables expression of the peptide in an appropriate host cell. “Operably-linked” refers to an association in which the regulatory regions and the peptide sequence to be expressed are joined and positioned in such a way as to permit transcription, and ultimately, translation.

[0061] The regulatory regions necessary for transcription of the peptide can be provided by the expression vector. A translation initiation codon (ATG) may also be provided if the peptide gene sequence lacking its cognate initiation codon is to be expressed. In a compatible host-construct system, cellular transcriptional factors, such as RNA polymerase, will bind to the regulatory regions on the expression construct to effect transcription of the peptide sequence in the host organism. The precise nature of the regulatory regions needed for gene expression may vary from host cell to host cell. Generally, a promoter is required which is capable of binding RNA polymerase and promoting the transcription of an operably-associated nucleic acid sequence. Such regulatory regions may include those 5′ non-coding sequences involved with initiation of transcription and translation, such as the TATA box, capping sequence, CAAT sequence, and the like. The non-coding region 3′ to the coding sequence may contain transcriptional termination regulatory sequences, such as terminators and polyadenylation sites.

[0062] In order to attach DNA sequences with regulatory functions, such as promoters, to the peptide gene sequence or to insert the peptide gene sequence into the cloning site of a vector, linkers or adapters providing the appropriate compatible restriction sites may be ligated to the ends of the cDNAs by techniques well known in the art (Wu et al., 1987, Methods in Enzymol 152:343-349, incorporated herein by reference in its entirety). Cleavage with a restriction enzyme can be followed by modification to create blunt ends by digesting back or filling in single-stranded DNA termini before ligation. Alternatively, a desired restriction enzyme site can be introduced into a fragment of DNA by amplification of the DNA by use of PCR with primers containing the desired restriction enzyme site.

[0063] An expression construct comprising a polypeptide coding sequence operably linked with regulatory regions can be directly introduced into appropriate host cells for expression and production of the peptide without further cloning. The expression constructs can also contain DNA sequences that facilitate integration of the DNA sequence into the genome of the host cell, e.g., via homologous recombination. In this instance, it is not necessary to use an expression vector comprising a replication origin suitable for appropriate host cells in order to propagate and express the peptide in the host cells.

[0064] A variety of expression vectors may be used including plasmids, cosmids, phage, phagemids or modified viruses. Typically, such expression vectors comprise a functional origin of replication for propagation of the vector in an appropriate host cell, one or more restriction endonuclease sites for insertion of the peptide gene sequence, and one or more selection markers. Expression vectors may be constructed to carry nucleotide sequences for one or more of the polypeptides disclosed herein. The expression vector must be used with a compatible host cell which may be derived from a prokaryotic or eukaryotic organism including but not limited to bacteria, yeasts, insects, mammals and humans. Such host cells can be transformed to express one or more polypeptides disclosed herein, such as by transformation of the host cell with a single expression vector containing a plurality of nucleotide sequences encoding any of the polypeptides disclosed herein, or by transformation of the host cell with multiple expression vectors encoding different polypeptides disclosed herein.

[0065] In bacterial systems, a number of expression vectors may be advantageously selected to produce polypeptides. For example, when a large quantity of such a protein is to be produced, such as for the generation of pharmaceutical compositions, vectors that direct the expression of high levels of fusion protein products that are readily purified may be desirable. Such vectors include the E. coli expression vector pUR278 (Ruther et al., 1983, EMBO J. 2, 1791, incorporated herein by reference in its entirety), in which the peptide coding sequence may be ligated individually into the vector in frame with the lac Z coding region so that a fusion protein is produced; pIN vectors (Inouye and Inouye, 1985, Nucleic Acids Res. 13, 3101-3109; Van Heeke and Schuster, 1989, J. Biol. Chem 264, 5503-5509, each of which is incorporated herein by reference in its entirety); and the like. pGEX vectors may also be used to express these peptides as fusion proteins with glutathione S-transferase (GST). In general, such fusion proteins are soluble and can easily be purified from lysed cells by adsorption to glutathione-agarose beads followed by elution in the presence of free glutathione. The pGEX vectors are designed to include thrombin or factor Xa protease cleavage sites so that the polypeptide can be released from the GST moiety.

[0066] Alternatively, for long term, high yield production of properly processed peptide complexes, stable expression in mammalian cells is preferred. Cell lines that stably express peptide complexes may be engineered by using a vector that contains a selectable marker. By way of example, following the introduction of the expression constructs, engineered cells may be allowed to grow for 1-2 days in an enriched media, and then are switched to a selective media. The selectable marker in the expression construct confers resistance to the selection and optimally allows cells to stably integrate the expression construct into their chromosomes and to grow in culture and to be expanded into cell lines. Such cells can be cultured for a long period of time while the peptide is expressed continuously.

[0067] The recombinant cells may be cultured under standard conditions of temperature, incubation time, optical density and media composition. However, conditions for growth of recombinant cells may be different from those for expression of the polypeptides. Modified culture conditions and media may also be used to enhance production of the peptides. For example, recombinant cells containing peptides with their cognate promoters may be exposed to heat or other environmental stress, or chemical stress. Any techniques known in the art may be applied to establish the optimal conditions for producing peptide complexes.

[0068] In one embodiment disclosed herein, a codon encoding methionine is added at the 5′ end of the nucleotide sequence encoding a polypeptide to provide a signal for initiation of translation of the peptide. This methionine may remain attached to the polypeptide, or the methionine may be removed by the addition of an enzyme or enzymes that can catalyze the cleavage of methionine from the peptide. For example, in both prokaryotes and eukaryotes, N-terminal methionine is removed by a methionine aminopeptidase (MAP) (Tsunasawa et al., 1985, J. Biol. Chem. 260, 5382-5391, incorporated herein by reference in its entirety). Methionine aminopeptidases have been isolated and cloned from several organisms, including E. coli, yeast, and rat.

[0069] The peptide may be recovered from the bacterial, mammalian, or other host cell types, or from the culture medium, by known methods (see, for example, Current Protocols in Immunology, vol. 2, chapter 8, Coligan et al. (ed.), John Wiley & Sons, Inc.; Pathogenic and Clinical Microbiology: A Laboratory Manual by Rowland et al., Little Brown & Co., June 1994, incorporated herein by reference in its entirety).

[0070] Both of the foregoing methods can be used for synthesizing a polypeptide disclosed herein. For example, a peptide comprising the amino acid sequence of the HSP-binding peptide can be synthesized chemically, and joined to an antigenic peptide, optionally produced by recombinant DNA technology, via a peptide bond.

[0071] Included within the scope disclosed herein are derivatives or analogs of the polypeptides disclosed herein that are modified during or after translation, e.g., by glycosylation, acetylation, phosphorylation, amidation (e.g., of the C-terminal carboxyl group), or derivatization by known protecting/blocking groups, or proteolytic cleavage. Any of numerous chemical modifications may be carried out by known techniques, including but not limited to, reagents useful for protection or modification of free NH₂— groups, free COOH— groups, OH— groups, side groups of Trp-, Tyr-, Phe-, His-, Arg-, or Lys-; specific chemical cleavage by cyanogen bromide, hydroxylamine, BNPS-Skatole, acid, or alkali hydrolysis; enzymatic cleavage by trypsin, chymotrypsin, papain, V8 protease, NaBH₄; acetylation, formylation, oxidation, reduction; metabolic synthesis in the presence of tunicamycin; etc.

### 6.3 Compositions Comprising Antigenic Polypeptides

[0072] In another aspect, the instant disclosure provides a composition (e.g., a pharmaceutical composition, a vaccine, or a unit dosage form thereof) comprising one or more antigenic polypeptide as disclosed herein. In certain embodiments, the composition comprises a plurality of the antigenic polypeptides disclosed herein. For example, in certain embodiments, the composition comprises 2, 3, 4, 5, 6, 7, 8, 9, 10, 11, 12, 13, 14, 15, 16, 17, 18, 19, 20, 21, 22, 23, 24, 25, 26, 27, 28, 29, 30, 31, 32, 33, 34, 35, 36, 37, 38, 39, 40, 41, 42, 43, 44, 45, 46, 47, 48, 49, or 50 different antigenic polypeptides as disclosed herein.

6.3.1 Compositions Comprising Antigenic Polypeptides in Complex with Stress Proteins

[0073] In certain embodiments, the instant disclosure provides a composition (e.g., a pharmaceutical composition) comprising one or more antigenic polypeptides as disclosed herein and a purified stress protein. In certain embodiments, at least a portion of the purified stress protein binds to the antigenic polypeptide in the composition. Such compositions are useful as vaccines for the treatment of a cancer.

[0074] Stress proteins, which are also referred to interchangeably herein as heat shock proteins (HSPs), useful in the practice of the instant invention can be selected from among any cellular protein that is capable of binding other proteins or peptides and capable of releasing the bound proteins or peptides in the presence of adenosine triphosphate (ATP) or under acidic conditions. The intracellular concentration of such protein may increase when a cell is exposed to a stressful stimulus. In addition to those heat shock proteins that are induced by stress, the HSP60, HSP70, HSP90, HSP100, sHSPs, and PDI families also include proteins that are related to stress-induced HSPs in sequence similarity, for example, having greater than 35% amino acid identity, but whose expression levels are not altered by stress. Therefore, stress protein or heat shock protein embraces other proteins, mutants, analogs, and variants thereof having at least 35% (e.g., at least 40, 45, 50, 55, 60, 65, 70, 75, 80, 85, 90, 95, or 99%) amino acid identity with members of these families whose expression levels in a cell are enhanced in response to a stressful stimulus. Accordingly, in certain embodiments, the stress protein is a member of the hsp60, hsp70, or hsp90 family of stress proteins (e.g., Hsc70, human Hsc70), or a mutant, analog, or variant thereof. In certain embodiments, the stress protein is selected from the group consisting of hsc70, hsp70, hsp90, hsp110, grp170, gp96, calreticulin, a mutant thereof, and combinations of two or more thereof. In certain embodiments, the stress protein is Hsc70 (e.g., human Hsc70). In certain embodiments, the stress protein comprises the amino acid sequence of SEQ ID NO: 8807. In certain embodiments, the amino acid sequence of the stress protein consists of the amino acid sequence of SEQ ID NO: 8807. In certain embodiments, the stress protein is Hsp70 (e.g., human Hsp70). In certain embodiments, the stress protein (e.g., human hsc70) is a recombinant protein.

[0075] Amino acid sequences and nucleotide sequences of naturally occurring HSPs are generally available in sequence databases, such as GenBank. For example, Homo sapiens heat shock protein HSP70 (Heat Shock 70 kDa Protein 1A) has the following identifiers HGNC: 5232; Entrez Gene: 3303; Ensembl: ENSG00000204389; OMIM: 140550; UniProtKB: P08107 and NCBI Reference Sequence: NM_005345.5. Computer programs, such as Entrez, can be used to browse the database, and retrieve any amino acid sequence and genetic sequence data of interest by accession number. These databases can also be searched to identify sequences with various degrees of similarities to a query sequence using programs, such as FASTA and BLAST, which rank the similar sequences by alignment scores and statistics. Nucleotide sequences of non-limiting examples of HSPs that can be used for preparation of the HSP peptide-binding fragments disclosed herein are as follows: human Hsp70, Genbank Accession No. NM_005345, Sargent et al., 1989, Proc. Natl. Acad. Sci. U.S.A., 86:1968-1972; human Hsc70: Genbank Accession Nos. P11142, Y00371; human Hsp90, Genbank Accession No. X15183, Yamazaki et al., Nucl. Acids Res. 17:7108; human gp96: Genbank Accession No. X15187, Maki et al., 1990, Proc. Natl. Acad Sci., 87: 5658-5562; human BiP: Genbank Accession No. M19645; Ting et al., 1988, DNA 7: 275-286; human Hsp27, Genbank Accession No. M24743; Hickey et al., 1986, Nucleic Acids Res. 14:4127-45; mouse Hsp70: Genbank Accession No. M35021, Hunt et al., 1990, Gene, 87:199-204; mouse gp96: Genbank Accession No. M16370, Srivastava et al., 1987, Proc. Natl. Acad. Sci., 85:3807-3811; and mouse BiP: Genbank Accession No. U16277, Haas et al., 1988, Proc. Natl. Acad. Sci. U.S.A., 85: 2250-2254 (each of these references is incorporated herein by reference in its entirety).

[0076] In addition to the major stress protein families described above, an endoplasmic reticulum resident protein, calreticulin, has also been identified as yet another heat shock protein useful for eliciting an immune response when complexed to antigenic molecules (Basu and Srivastava, 1999, J. Exp. Med. 189:797-202; incorporated herein by reference in its entirety). Other stress proteins that can be used in the invention include grp78 (or BiP), protein disulfide isomerase (PDI), hsp110, and grp170 (Lin et al., 1993, Mol. Biol. Cell, 4:1109-1119; Wang et al., 2001, J. Immunol., 165:490-497, each of which is incorporated herein by reference in its entirety). Many members of these families were found subsequently to be induced in response to other stressful stimuli including nutrient deprivation, metabolic disruption, oxygen radicals, hypoxia and infection with intracellular pathogens (see Welch, May 1993, Scientific American 56-64; Young, 1990, Annu. Rev. Immunol. 8:401-420; Craig, 1993, Science 260:1902-1903; Gething, et al., 1992, Nature 355:33-45; and Lindquist, et al., 1988, Annu. Rev. Genetics 22:631-677, each of which is incorporated herein by reference in its entirety). It is contemplated that HSPs/stress proteins belonging to all of these families can be used in the practice disclosed herein. In certain embodiments, a stress protein encompasses any chaperone protein that facilitates peptide-WIC presentation. Suitable chaperone proteins include, but are not limited to, ER chaperones and tapasin (e.g., human tapasin).

[0077] The major stress proteins can accumulate to very high levels in stressed cells, but they occur at low to moderate levels in cells that have not been stressed. For example, the highly inducible mammalian hsp70 is hardly detectable at normal temperatures but becomes one of the most actively synthesized proteins in the cell upon heat shock (Welch, et al., 1985, J. Cell. Biol. 101:1198-1211, incorporated herein by reference in its entirety). In contrast, hsp90 and hsp60 proteins are abundant at normal temperatures in most, but not all, mammalian cells and are further induced by heat (Lai, et al., 1984, Mol. Cell. Biol. 4:2802-10; van Bergen en Henegouwen, et al., 1987, Genes Dev. 1:525-31, each of which is incorporated herein by reference in its entirety).

[0078] In various embodiments, nucleotide sequences encoding heat shock protein within a family or variants of a heat shock protein can be identified and obtained by hybridization with a probe comprising nucleotide sequence encoding an HSP under conditions of low to medium stringency. By way of example, procedures using such conditions of low stringency are as follows (see also Shilo and Weinberg, 1981, Proc. Natl. Acad. Sci. USA 78:6789-6792). Filters containing DNA are pretreated for 6 h at 40° C. in a solution containing 35% formamide, 5×SSC, 50 mM Tris-HCl (pH 7.5), 5 mM EDTA, 0.1% PVP, 0.1% Ficoll, 1% BSA, and 500 μg/ml denatured salmon sperm DNA. Hybridizations are carried out in the same solution with the following modifications: 0.02% PVP, 0.02% Ficoll, 0.2% BSA, 100 μg/ml salmon sperm DNA, 10% (wt/vol) dextran sulfate. Filters are incubated in hybridization mixture for 18-20 h at 40° C., and then washed for 1.5 h at 55° C. in a solution containing 2×SSC, 25 mM Tris-HCl (pH 7.4), 5 mM EDTA, and 0.1% SDS. The wash solution is replaced with fresh solution and incubated an additional 1.5 h at 60° C. Filters are blotted dry and exposed for signal detection. If necessary, filters are washed for a third time at 65-68° C. before signal detection. Other conditions of low stringency which may be used are well known in the art (e.g., as used for cross-species hybridizations).

[0079] Where stress proteins are used, peptide-binding fragments of stress proteins and functionally active derivatives, analogs, and variants thereof can also be used. Accordingly, in certain embodiments, the stress protein is a full-length HSP. In certain embodiments, the stress protein is a polypeptide comprising a domain of an HSP (e.g., a member of the Hsp60, Hsp70, or Hsp90 family, such as Hsc70, particularly human Hsc70), wherein the domain is capable of being noncovalently associated with a peptide (e.g., an HSP-binding peptide as described herein) to form a complex and optionally eliciting an immune response, and wherein the stress protein is not a full-length HSP.

[0080] In certain embodiments, the stress protein is a polypeptide that is capable of being noncovalently associated with a peptide (e.g., an HSP-binding peptide as described herein) to form a complex and optionally eliciting an immune response, wherein the stress protein shares a high degree of sequence similarity with a wild-type HSP (e.g., a member of the Hsp60, Hsp70, or Hsp90 family, such as Hsc70, particularly human Hsc70). To determine a region of identity between two amino acid sequences or nucleic acid sequences, the sequences are aligned for optimal comparison purposes (e.g., gaps can be introduced in the sequence of a first amino acid or nucleic acid sequence for optimal alignment with a second amino or nucleic acid sequence). The amino acid residues or nucleotides at corresponding amino acid positions or nucleotide positions are then compared. When a position in the first sequence is occupied by the same amino acid residue or nucleotide as the corresponding position in the second sequence, then the molecules are identical at that position. The percent identity between the two sequences is a function of the number of identical positions shared by the sequences (i.e., % identity=number of identical overlapping positions/total number of positions×100%). In one embodiment, the two sequences are the same length.

[0081] The determination of percent identity between two sequences can also be accomplished using a mathematical algorithm. A non-limiting example of a mathematical algorithm utilized for the comparison of two sequences is the algorithm of Karlin and Altschul, 1990, Proc. Natl. Acad. Sci. USA 87:2264-2268, modified as in Karlin and Altschul, 1993, Proc. Natl. Acad. Sci. USA 90:5873-5877 (each of which is incorporated herein by reference in its entirety). Such an algorithm is incorporated into the NBLAST and XBLAST programs of Altschul, et al., 1990, J. Mol. Biol. 215:403-410 (incorporated herein by reference in its entirety). BLAST nucleotide searches can be performed with the NBLAST program, e.g., score=100, wordlength=12 to obtain nucleotide sequences homologous to a nucleic acid molecule disclosed herein. BLAST protein searches can be performed with the XBLAST program, e.g., score=50, wordlength=3 to obtain amino acid sequences homologous to a protein molecule disclosed herein. To obtain gapped alignments for comparison purposes, Gapped BLAST can be utilized as described in Altschul et al., 1997, Nucleic Acids Res. 25:3389-3402. Alternatively, PSI-Blast can be used to perform an iterated search which detects distant relationships between molecules (Altschul et al., 1997, supra). When utilizing BLAST, Gapped BLAST, and PSI-Blast programs, the default parameters of the respective programs (e.g., XBLAST and NBLAST) can be used. Another example of a mathematical algorithm utilized for the comparison of sequences is the algorithm of Myers and Miller, 1988, CABIOS 4:11-17. Such an algorithm is incorporated into the ALIGN program (version 2.0) which is part of the GCG sequence alignment software package. When utilizing the ALIGN program for comparing amino acid sequences, a PAM120 weight residue table, a gap length penalty of 12, and a gap penalty of 4 can be used. The percent identity between two sequences can be determined using techniques similar to those described above, with or without allowing gaps. In calculating percent identity, typically only exact matches are counted.

[0082] In certain embodiments, isolated peptide-binding domains of a stress protein (e.g., Hsp70 or Hsc70) are employed. These peptide-binding domains can be identified by computer modeling of the three-dimensional structure of the peptide-binding site of a stress protein (e.g., Hsp70 and Hsc70). See for example, the peptide-binding fragments of HSPs disclosed in United States patent publication US 2001/0034042 (incorporated herein by reference in its entirety).

[0083] In certain embodiments, the stress protein is a mutated stress protein which has an affinity for a target polypeptide that is greater than a native stress protein. Such mutated stress proteins can be useful when the target polypeptide is phosphorylated or is a phosphopeptide mimetic (such as non-hydrolyzable analogs) or has some other post-translational modification.

[0084] The stress proteins can be prepared by purification from tissues, or by recombinant DNA techniques. HSPs can be purified from tissues in the presence of ATP or under acidic conditions (pH 1 to pH 6.9), for subsequent in vitro complexing to one or more polypeptides. See Peng, et al., 1997, J. Immunol. Methods, 204:13-21; Li and Srivastava, 1993, EMBO J. 12:3143-3151 (each of these references is incorporated herein by reference in its entirety). “Purified” stress proteins are substantially free of materials that are associated with the proteins in a cell, in a cell extract, in a cell culture medium, or in an individual. In certain embodiments, the stress protein purified from a tissue is a mixture of different HSPs, for example, hsp70 and hsc70.

[0085] Using the defined amino acid or cDNA sequences of a given HSP or a peptide-binding domain thereof, one can make a genetic construct which is transfected into and expressed in a host cell. The recombinant host cells may contain one or more copies of a nucleic acid sequence comprising a sequence that encodes an HSP or a peptide-binding fragment, operably linked with regulatory region(s) that drives the expression of the HSP nucleic acid sequence in the host cell. Recombinant DNA techniques can be readily utilized to generate recombinant HSP genes or fragments of HSP genes, and standard techniques can be used to express such HSP gene fragments. Any nucleic acid sequence encoding an HSP peptide-binding domain, including cDNA and genomic DNA, can be used to prepare the HSPs or peptide-binding fragments disclosed herein. The nucleic acid sequence can be wild-type or a codon-optimized variant that encodes the same amino acid sequence. An HSP gene fragment containing the peptide-binding domain can be inserted into an appropriate cloning vector and introduced into host cells so that many copies of the gene sequence are generated. A large number of vector-host systems known in the art may be used such as, but not limited to, bacteriophages such as lambda derivatives, or plasmids such as pBR322, pUC plasmid derivatives, the Bluescript vectors (Stratagene) or the pET series of vectors (Novagen). Any technique for mutagenesis known in the art can be used to modify individual nucleotides in a DNA sequence, for purpose of making amino acid substitution(s) in the expressed peptide sequence, or for creating/deleting restriction sites to facilitate further manipulations.

[0086] The stress proteins may be expressed as fusion proteins to facilitate recovery and purification from the cells in which they are expressed. For example, the stress proteins may contain a signal sequence leader peptide to direct its translocation across the endoplasmic reticulum membrane for secretion into culture medium. Further, the stress protein may contain an affinity label fused to any portion of the protein not involved in binding to a target polypeptide, for example, the carboxyl terminus. The affinity label can be used to facilitate purification of the protein, by binding to an affinity partner molecule. A variety of affinity labels known in the art may be used, non-limiting examples of which include the immunoglobulin constant regions, polyhistidine sequence (Petty, 1996, Metal-chelate affinity chromatography, in Current Protocols in Molecular Biology, Vol. 2, Ed. Ausubel et al., Greene Publish. Assoc. & Wiley Interscience, incorporated herein by reference in its entirety), glutathione S-transferase (GST; Smith, 1993, Methods Mol. Cell Bio. 4:220-229, incorporated herein by reference in its entirety), the E. coli maltose binding protein (Guan et al., 1987, Gene 67:21-30, incorporated herein by reference in its entirety), and various cellulose binding domains (U.S. Pat. Nos. 5,496,934; 5,202,247; 5,137,819; Tomme et al., 1994, Protein Eng. 7:117-123, each of which is incorporated herein by reference in its entirety).

[0087] Such recombinant stress proteins can be assayed for peptide binding activity (see, e.g., Klappa et al., 1998, EMBO J., 17:927-935, incorporated herein by reference in its entirety) for their ability to elicit an immune response. In certain embodiments, the recombinant stress protein produced in the host cell is of the same species as the intended recipient of the immunogenic composition (e.g., human).

[0088] The stress protein may be bound to the polypeptide(s) non-covalently or covalently. In certain embodiments, the stress protein is non-covalently bound to the polypeptide. Methods of preparing such complexes are set forth infra.

[0089] The molar ratio of total polypeptide(s) to total stress protein(s) can be any ratio from about 0.01:1 to about 100:1, including but not limited to about 0.01:1, 0.02:1, 0.05:1. 0.1:1. 0.2:1, 0.5:1, 1:1, 1.5:1, 2:1, 2.5:1, 3:1, 4:1, 5:1, 6:1, 7:1, 8:1, 9:1, 10:1, 11:1, 12:1, 13:1, 14:1, 15:1, 16:1, 17:1, 18:1, 19:1, 20:1, 30:1, 40:1, 49:1, up to 100:1. In certain embodiments, the composition comprises a plurality of complexes each comprising a polypeptide disclosed herein and a stress protein, wherein the molar ratio of the polypeptide to the stress protein in each complex is at least about 1:1 (e.g., about 1.5:1, 2:1, 2.5:1, 3:1, 4:1, 5:1, 6:1, 7:1, 8:1, 9:1, 10:1, 11:1, 12:1, 13:1, 14:1, 15:1, 16:1, 17:1, 18:1, 19:1, 20:1, 30:1, 40:1, 49:1, up to 100:1).

[0090] In certain embodiments, the molar ratio of total polypeptide(s) to total stress protein(s) is about 0.5:1 to 5:1. In certain embodiments, the molar ratio of total polypeptide(s) to total stress protein(s) is about 1:1 to 2:1. In certain embodiments, the molar ratio of total polypeptide(s) to total stress protein(s) is about 1:1, 1.25:1, 1.5:1, 2:1, 2.5:1, 3:1, 3.5:1, 4:1, 4.5:1, or 5:1. Such ratios, particularly the ratios close to 1:1, are advantageous in that the composition does not comprise a great excess of free peptide(s) that is not bound to a stress protein. Since many antigenic peptides comprising WIC-binding peptides tend to comprise hydrophobic regions, an excess amount of free peptide(s) may tend to aggregate during preparation and storage of the composition. Substantial complexation with a stress protein at a molar ratio of total polypeptide(s) to total stress protein(s) close to 1:1 (e.g., 1:1, 1.25:1, 1.5:1, or 2:1) is enabled by a high binding affinity of the polypeptide to the stress protein. Accordingly, in certain embodiments, the polypeptide binds to an HSP (e.g., Hsc70, Hsp70, Hsp90, Hsp110, Grp170, Gp96, or Calreticulin) with a K_{d} lower than 10⁻³ M, 10⁻⁴ M, 10⁻⁵ M, 10⁻⁶ M, 10⁻⁷ M, 10⁻⁸ M, or 10⁻⁹ M. In certain embodiments, the polypeptide binds to Hsc70 (e.g., human Hsc70) with a K_{d} of 10⁻³ M, 10⁻⁴ M, 10⁻⁵ M, 10⁻⁶ M, 10⁻⁷ M, 10⁻⁸M, 10⁻⁹M, or lower.

[0091] In certain embodiments, at least 40%, 45%, 50%, 55%, 60%, 65%, 70%, 75%, 80%, 85%, 90%, or 95% of the stress protein binds to the polypeptide in the composition. In certain embodiments, substantially all of the stress protein binds to the polypeptide in the composition.

[0092] Any number of different polypeptides can be included in a single composition as disclosed herein. In certain embodiments, the compositions comprise no more than 100 different polypeptides, e.g., 2-50, 2-30, 2-20, 5-20, 5-15, 5-10, or 10-15 different polypeptides.

[0093] In certain embodiments, each of the antigenic polypeptides comprises the same HSP-binding peptide and a different antigenic peptide. In certain embodiments, the composition comprises a single stress protein, wherein the stress protein is capable of binding to the HSP-binding peptide.

[0094] Pharmaceutical compositions comprising the complexes of stress proteins and antigenic polypeptides disclosed herein can be formulated to contain one or more pharmaceutically acceptable carriers or excipients including bulking agents, stabilizing agents, buffering agents, sodium chloride, calcium salts, surfactants, antioxidants, chelating agents, other excipients, and combinations thereof.

[0095] Bulking agents are preferred in the preparation of lyophilized formulations of the composition. Such bulking agents form the crystalline portion of the lyophilized product and may be selected from the group consisting of mannitol, glycine, alanine, and hydroxyethyl starch (HES).

[0096] Stabilizing agents may be selected from the group consisting of sucrose, trehalose, raffinose, and arginine. These agents are preferably present in amounts between 1-4%. Sodium chloride can be included in the present formulations preferably in an amount of 100-300 mM, or if used without the aforementioned bulking agents, can be included in the formulations in an amount of between 300-500 mM NaCl. Calcium salts include calcium chloride, calcium gluconate, calcium glubionate, or calcium gluceptate.

[0097] Buffering agents can be any physiologically acceptable chemical entity or combination of chemical entities which have a capacity to act as buffers, including but not limited to histidine, potassium phosphate, TRIS [tris-(hydroxymethyl)-aminomethane], BIS-Tris Propane (1,3-bis-[tris-(hydroxymethyl)methylamino]-propane), PIPES [piperazine-N,N′-bis-(2-ethanesulfonic acid)], MOPS [3-(N-morpholino)ethanesulfonic acid], HEPES (N-2-hydroxyethyl-piperazine-N′-2-ethanesulfonic acid), IVIES [2-(N-morpholino)ethanesulfonic acid], and ACES (N-2-acetamido-2-aminoethanesulfonic acid). Typically, the buffering agent is included in a concentration of 10-50 mM. Specific examples of base buffers include (i) PBS; (ii) 10 mM KPO₄, 150 mM NaCl; (iii) 10 mM HEPES, 150 mM NaCl; (iv) 10 mM imidazole, 150 mM NaCl; and (v) 20 mM sodium citrate. Excipients that can be used include (i) glycerol (10%, 20%); (ii) Tween 50 (0.05%, 0.005%); (iii) 9% sucrose; (iv) 20% sorbitol; (v) 10 mM lysine; or (vi) 0.01 mM dextran sulfate.

[0098] Surfactants, if present, are preferably in a concentration of 0.1% or less, and may be chosen from the group including but not limited to polysorbate 20, polysorbate 80, pluronic polyols, and BRIJ 35 (polyoxyethylene 23 laurel ether). Antioxidants, if used, must be compatible for use with a pharmaceutical preparation, and are preferably water soluble. Suitable antioxidants include homocysteine, glutathione, lipoic acid, 6-hydroxy-2,5,7,8-tetramethylchroman-2-carboxylic acid (Trolox), methionine, sodium thiosulfate, platinum, glycine-glycine-histidine (tripeptide), and butylatedhydroxytoluene (BHT). Chelating agents should preferably bind metals such as copper and iron with greater affinity than calcium, if a calcium salt is being used in the composition. An exemplary chelator is deferoxamine.

[0099] Many formulations known in the art can be used. For example, U.S. Pat. No. 5,763,401 describes a therapeutic formulation, comprising 15-60 mM sucrose, up to 50 mM NaCl, up to 5 mM calcium chloride, 65-400 mM glycine, and up to 50 mM histidine. In some embodiments, the therapeutic formulation is a solution of 9% sucrose in potassium phosphate buffer.

[0100] U.S. Pat. No. 5,733,873 (incorporated herein by reference in its entirety) discloses formulations which include between 0.01-1 mg/ml of a surfactant. This patent discloses formulations having the following ranges of excipients: polysorbate 20 or 80 in an amount of at least 0.01 mg/ml, preferably 0.02-1.0 mg/ml; at least 0.1 M NaCl; at least 0.5 mM calcium salt; and at least 1 mM histidine. More particularly, the following specific formulations are also disclosed: (1) 14.7-50-65 mM histidine, 0.31-0.6 M NaCl, 4 mM calcium chloride, 0.001-0.02-0.025% polysorbate 80, with or without 0.1% PEG 4000 or 19.9 mM sucrose; and (2) 20 mg/ml mannitol, 2.67 mg/ml histidine, 18 mg/ml NaCl, 3.7 mM calcium chloride, and 0.23 mg/ml polysorbate 80.

[0101] The use of low or high concentrations of sodium chloride has been described, for example U.S. Pat. No. 4,877,608 (incorporated herein by reference in its entirety) teaches formulations with relatively low concentrations of sodium chloride, such as formulations comprising 0.5 mM-15 mM NaCl, 5 mM calcium chloride, 0.2 mM-5 mM histidine, 0.01-10 mM lysine hydrochloride and up to 10% maltose, 10% sucrose, or 5% mannitol.

[0102] U.S. Pat. No. 5,605,884 (incorporated herein by reference in its entirety) teaches the use of formulations with relatively high concentrations of sodium chloride. These formulations include 0.35 M-1.2 M NaCl, 1.5-40 mM calcium chloride, 1 mM-50 mM histidine, and up to 10% sugar such as mannitol, sucrose, or maltose. A formulation comprising 0.45 M NaCl, 2.3 mM calcium chloride, and 1.4 mM histidine is exemplified.

[0103] International Patent Application WO 96/22107 (incorporated herein by reference in its entirety) describes formulations which include the sugar trehalose, for example formulations comprising: (1) 0.1 M NaCl, 15 mM calcium chloride, 15 mM histidine, and 1.27 M (48%) trehalose; or (2) 0.011% calcium chloride, 0.12% histidine, 0.002% TRIS, 0.002% Tween 80, 0.004% PEG 3350, 7.5% trehalose; and either 0.13% or 1.03% NaCl.

[0104] U.S. Pat. No. 5,328,694 (incorporated herein by reference in its entirety) describes a formulation which includes 100-650 mM disaccharide and 100 mM-1.0 M amino acid, for example (1) 0.9 M sucrose, 0.25 M glycine, 0.25 M lysine, and 3 mM calcium chloride; and (2) 0.7 M sucrose, 0.5 M glycine, and 5 mM calcium chloride. Pharmaceutical compositions can be optionally prepared as lyophilized product, which may then be formulated for oral administration or reconstituted to a liquid form for parenteral administration.

[0105] In certain embodiments, the composition stimulates a T-cell response against a cell expressing or displaying a polypeptide comprising one or more of the WIC-binding peptides in a subject to whom the composition is administered. The cell expressing the polypeptide may be a cell comprising a polynucleotide encoding the polypeptide, wherein the polynucleotide is in the genome of the cell, in an episomal vector, or in the genome of a virus that has infected the cell. The cell displaying the polypeptide may not comprise a polynucleotide encoding the polypeptide, and may be produced by contacting the cell with the polypeptide or a derivative thereof.

[0106] In certain embodiments, the composition induces in vitro activation of T cells in peripheral blood mononuclear cells (PBMCs) isolated from a subject. The in vitro activation of T cells includes, without limitation, in vitro proliferation of T cells, production of cytokines (e.g., IFNγ) from T cells, and increased surface expression of activation markers (e.g., CD25, CD45RO) on T cells.

### 6.3.2 Preparation of Complexes of Antigenic Polypeptides and Stress Proteins

[0107] In another aspect, the instant disclosure provides a method of making complexes of antigenic polypeptides and stress proteins (e.g., for the purposes of making a vaccine), the method comprising mixing one or more antigenic polypeptides as disclosed herein with a purified stress protein in vitro under suitable conditions such that the purified stress protein binds to at least one of the antigenic polypeptides. The method is also referred to as a complexing reaction herein. In certain embodiments, two or more purified stress proteins are employed, wherein each purified stress protein binds to at least one of the antigenic polypeptides. In certain embodiments, at least a portion of the purified stress protein binds to the antigenic polypeptide in the composition.

[0108] The stress protein may be bound to the polypeptide non-covalently or covalently. In certain embodiments, the stress protein is non-covalently bound to the polypeptide. In various embodiments, the complexes formed in vitro are optionally purified. Purified complexes of stress proteins and polypeptides are substantially free of materials that are associated with such complexes in a cell, or in a cell extract. Where purified stress proteins and purified polypeptides are used in an in vitro complexing reaction, the term “purified complex(es)” does not exclude a composition that also comprises free stress proteins and conjugates or peptides not in complexes.

[0109] Any stress proteins described supra may be employed in the method disclosed herein. In certain embodiments, the stress protein is selected from the group consisting of Hsc70, Hsp70, Hsp90, Hsp110, Grp170, Gp96, Calreticulin, a mutant thereof, and combinations of two or more thereof. In one embodiment, the stress protein is an Hsc70, e.g., a human Hsc70. In another embodiment, the stress protein is an Hsp70, e.g., a human Hsp70. In certain embodiments, the stress protein (e.g., human Hsc70 or human Hsp70) is a recombinant protein.

[0110] Prior to complexing, HSPs can be pretreated with ATP or exposed to acidic conditions to remove any peptides that may be non-covalently associated with the HSP of interest. Acidic conditions are any pH levels below pH 7, including the ranges pH 1-pH 2, pH 2-pH 3, pH 3-pH 4, pH 4-pH 5, pH 5-pH 6, and pH 6-pH 6.9. When the ATP procedure is used, excess ATP is removed from the preparation by the addition of apyranase as described by Levy, et al., 1991, Cell 67:265-274 (incorporated herein by reference in its entirety). When acidic conditions are used, the buffer is readjusted to neutral pH by the addition of pH modifying reagents.

[0111] In certain embodiments, prior to complexation with purified stress proteins, the polypeptides may be reconstituted from powder in 100% DMSO. Equimolar amounts of the peptides may then be pooled in a solution of 75% DMSO diluted in sterile water.

[0112] In certain embodiments, prior to complexation with purified stress proteins, the polypeptides may be reconstituted in neutral water.

[0113] In certain embodiments, prior to complexation with purified stress proteins, the polypeptides may be reconstituted in acidic water containing HCl or another acid.

[0114] In certain embodiments, prior to complexation with purified stress proteins, the polypeptides may be reconstituted in basic water containing NaOH, or NH₄OH, or another base.

[0115] In certain embodiments, prior to complexation with purified stress proteins, the solubility of each polypeptide in water may be tested. If a polypeptide is soluble in neutral water, neutral water may be used as a solvent for the polypeptide. If the polypeptide is not soluble in neutral water, solubility in acidic water containing HCl, or another acid, e.g., acetic acid, phosphoric acid, or sulfuric acid may be tested. If the polypeptide is soluble in acidic water containing HCl (or another acid), acidic water containing HCl (or another acid) may be used as the solvent for the polypeptide. If the polypeptide is not soluble in acidic water containing HCl (or another acid), solubility in basic water containing NaOH may be tested. If the polypeptide is soluble in basic water containing NaOH, basic water containing NaOH may be used as the solvent for the polypeptide. If the polypeptide is not soluble in basic water containing NaOH, the polypeptide may be dissolved in DMSO. If the polypeptide is not soluble in DMSO the polypeptide may be excluded. The dissolved polypeptides may then be mixed to make a pool of polypeptides. The dissolved polypeptides may be mixed at equal volume. The dissolved polypeptides may be mixed in equimolar amounts.

[0116] The molar ratio of total polypeptide(s) to total stress protein(s) can be any ratio from 0.01:1 to 100:1, including but not limited to 0.01:1, 0.02:1, 0.05:1. 0.1:1. 0.2:1, 0.5:1, 1:1, 1.5:1, 2:1, 2.5:1, 3:1, 4:1, 5:1, 6:1, 7:1, 8:1, 9:1, 10:1, 11:1, 12:1, 13:1, 14:1, 15:1, 16:1, 17:1, 18:1, 19:1, 20:1, 30:1, 40:1, 49:1, up to 100:1. In certain embodiments, the composition to be prepared comprises a plurality of complexes each comprising a polypeptide disclosed herein and a stress protein, and the complexing reaction comprises mixing the polypeptides with the stress proteins, wherein the molar ratio of the polypeptide to the stress protein in each complex is at least 1:1 (e.g., about 2:1, 3:1, 4:1, 5:1, 6:1, 7:1, 8:1, 9:1, 10:1, 11:1, 12:1, 13:1, 14:1, 15:1, 16:1, 17:1, 18:1, 19:1, 20:1, 30:1, 40:1, 49:1, up to 100:1).

[0117] In certain embodiments, the molar ratio of total polypeptide(s) to total stress protein(s) is about 0.5:1 to 5:1. In certain embodiments, the molar ratio of total polypeptide(s) to total stress protein(s) is about 1:1, 1.25:1, 1.5:1, 2:1, 2.5:1, 3:1, 3.5:1, 4:1, 4.5:1, or 5:1. In certain embodiments, the molar ratio of total polypeptide(s) to total stress protein(s) is about 1:1, 1.25:1, or 1.5:1. Such ratios, particularly the ratios close to 1:1, are advantageous in that the composition does not comprise a great excess of free peptide(s) that is not bound to a stress protein. Since many antigenic peptides comprising WIC-binding peptides tend to comprise hydrophobic regions, an excess amount of free peptide(s) may tend to aggregate during preparation and storage of the composition. Substantial complexation with a stress protein at a molar ratio of total polypeptide(s) to total stress protein(s) close to 1:1 (e.g., 1:1, 1.25:1, 1.5:1, or 2:1) is enabled by a high binding affinity of the polypeptide to the stress protein. Accordingly, in certain embodiments, the polypeptide used in the complexing reaction binds to an HSP (e.g., Hsc70, Hsp70, Hsp90, Hsp110, Grp170, Gp96, or Calreticulin) with a K_{d} lower than 10⁻³ M, 10⁻⁴ M, 10⁻⁵ M, 10⁻⁶ M, 10⁻⁷ M, 10⁻⁸ M, or 10⁻⁹ M. In certain embodiments, the polypeptide binds to Hsc70 (e.g., human Hsc70) with a K_{d} of 10⁻³ M, 10⁻⁴ M, 10⁻⁵ M, 10⁻⁶ M, 10⁻⁷ M, 10⁻⁸ M, 10⁻⁹ M, or lower.

[0118] The method disclosed herein can be used to prepare a composition (e.g., a pharmaceutical composition) in bulk (e.g., greater than or equal to 30 mg, 50 mg, 100 mg, 200 mg, 300 mg, 500 mg, or 1 g of total peptide and protein). The prepared composition can then be transferred to single-use or multi-use containers, or apportioned to unit dosage forms. Alternatively, the method disclosed herein can be used to prepare a composition (e.g., a pharmaceutical composition) in a small amount (e.g., less than or equal to 300 μg, 1 mg, 3 mg, 10 mg, 30 mg, or 100 mg of total peptide and protein). In certain embodiments, the composition is prepared for single use, optionally in a unit dosage form.

[0119] In certain embodiments, the total amount of the polypeptide(s) and stress protein in the composition is about 10 μg to 600 μg (e.g., about 50 μg, 100 μg, 200 μg, 300 μg, 400 μg, or 500 μg, optionally about 120 μg, 240 μg, or 480 μg). In certain embodiments, the total amount of the polypeptide(s) and stress protein in the composition is about 300 μg. Amounts of the stress protein(s) and polypeptide(s) in a unit dosage form are disclosed infra.

[0120] An exemplary protocol for noncovalent complexing of a population of polypeptides to a stress protein in vitro is provided herein. The population of polypeptides can comprise a mixture of the different polypeptide species disclosed herein. Then, the mixture is incubated with the purified and/or pretreated stress protein for from 15 minutes to 3 hours (e.g., 1 hour) at from 4° to 50° C. (e.g., 37° C.) in a suitable binding buffer, such as phosphate buffered saline pH 7.4 optionally supplemented with 0.01% Polysorbate 20; a buffer comprising 9% sucrose in potassium phosphate buffer; a buffer comprising 2.7 mM Sodium Phosphate Dibasic, 1.5 mM Potassium Phosphate Monobasic, 150 mM NaCl, pH 7.2; a buffer containing 20 mM sodium phosphate, pH 7.2-7.5, 350-500 mM NaCl, 3 mM MgCl₂ and 1 mM phenyl methyl sulfonyl fluoride (PMSF); and the buffer optionally comprising 1 mM ADP. Any buffer may be used that is compatible with the stress protein. The preparations are then optionally purified by centrifugation through a Centricon 10 assembly (Millipore; Billerica, Mass.) to remove any unbound peptide. The non-covalent association of the proteins/peptides with the HSPs can be assayed by High Performance Liquid Chromatography (HPLC), Mass Spectrometry (MS), mixed lymphocyte target cell assay (MLTC), or enzyme-linked immunospot (ELISPOT) assay (Taguchi T, et al., J Immunol Methods 1990; 128: 65-73, incorporated herein by reference in its entirety). Once the complexes have been isolated and diluted, they can be optionally characterized further in animal models using the administration protocols and excipients described herein (see, e.g., Example 2 infra).

[0121] Complexes of stress proteins and antigenic polypeptides from separate covalent and/or non-covalent complexing reactions can be prepared to form a composition before administration to a subject. In certain embodiments, the composition is prepared within 1, 2, 3, 4, 5, 6, or 7 days before administration to a subject. In certain embodiments, the composition is prepared within 1, 2, 3, 4, 5, 6, 7, or 8 weeks before administration to a subject. In certain embodiments, the composition is prepared within 1, 2, 3, 4, 5, 6, 7, 8, 9, 10, 11, or 12 months before administration to a subject. The composition can optionally be stored at about 4° C., −20° C., or −80° C. after preparation and before use.

[0122] In certain embodiments, the complexes prepared by the method disclosed herein are mixed with an adjuvant at bedside just prior to administration to a patient. In certain embodiments, the adjuvant comprises a saponin or an immunostimulatory nucleic acid. In certain embodiments, the adjuvant comprises QS-21. In certain embodiments, the dose of QS-21 is 10 μg, 25 μg, 50 μg, 75 μg, 100 μg, 125 μg, 150 μg, 175 μg, or 200 μg. In certain embodiments, the dose of QS-21 is about 100 μg. In certain embodiments, the adjuvant comprises a TLR agonist. In certain embodiments, the TLR agonist is an agonist of TLR4. In certain embodiments, the TLR agonist is an agonist of TLR7 and/or TLR8. In certain embodiments, the TLR agonist is an agonist of TLR9. In certain embodiments, the TLR agonist is an agonist of TLR5.

[0123] As an alternative to making non-covalent complexes of stress proteins and polypeptides, the polypeptides can be covalently attached to stress proteins, e.g., by chemical crosslinking or UV crosslinking. Any chemical crosslinking or UV crosslinking methods known in the art (see, e.g., Wong, 1991, Chemistry of Protein Conjugation and Cross-Linking, CRC Press, incorporated herein by reference in its entirety) can be employed. For example, glutaraldehyde crosslinking (see, e.g., Barrios et al., 1992, Eur. J. Immunol. 22: 1365-1372, incorporated herein by reference in its entirety) may be used. In an exemplary protocol, 1-2 mg of HSP-peptide complex is cross-linked in the presence of 0.002% glutaraldehyde for 2 hours. Glutaraldehyde is removed by dialysis against phosphate buffered saline (PBS) overnight (Lussow et al., 1991, Eur. J. Immunol. 21: 2297-2302, incorporated herein by reference in its entirety).

### 6.3.3 Vaccines

[0124] In another aspect, the instant disclosure provides a vaccine comprising the polypeptide compositions (e.g., antigenic polypeptide compositions) disclosed herein. The vaccine may be prepared by any method that results in a stable, sterile, preferably injectable formulation.

[0125] In certain embodiments, the vaccine comprises one or more compositions disclosed herein and one or more adjuvants. A variety of adjuvants may be employed, including, for example, systemic adjuvants and mucosal adjuvants. A systemic adjuvant is an adjuvant that can be delivered parenterally. Systemic adjuvants include adjuvants that create a depot effect, adjuvants that stimulate the immune system, and adjuvants that do both.

[0126] An adjuvant that creates a depot effect is an adjuvant that causes the antigen to be slowly released in the body, thus prolonging the exposure of immune cells to the antigen. This class of adjuvants includes alum (e.g., aluminum hydroxide, aluminum phosphate); or emulsion-based formulations including mineral oil, non-mineral oil, water-in-oil or oil-in-water-in oil emulsion, oil-in-water emulsions such as Seppic ISA series of Montanide adjuvants (e.g., Montanide ISA 720, AirLiquide, Paris, France); MF-59 (a squalene-in-water emulsion stabilized with Span 85 and Tween 80; Chiron Corporation, Emeryville, Calif.; and PROVAX (an oil-in-water emulsion containing a stabilizing detergent and a micelle-forming agent; IDEC, Pharmaceuticals Corporation, San Diego, Calif.).

[0127] Other adjuvants stimulate the immune system, for instance, cause an immune cell to produce and secrete cytokines or IgG. This class of adjuvants includes immunostimulatory nucleic acids, such as CpG oligonucleotides; saponins purified from the bark of the Q. saponaria tree, such as QS-21; poly[di(carboxylatophenoxy)phosphazene (PCPP polymer; Virus Research Institute, USA); RNA mimetics such as polyinosinic:polycytidylic acid (poly I:C) or poly I:C stabilized with poly-lysine (poly-ICLC [Hiltonol®; Oncovir, Inc.]; derivatives of lipopolysaccharides (LPS) such as monophosphoryl lipid A (MPL; Ribi ImmunoChem Research, Inc., Hamilton, Mont.), muramyl dipeptide (MDP; Ribi) and threonyl-muramyl dipeptide (t-MDP; Ribi); OM-174 (a glucosamine disaccharide related to lipid A; OM Pharma SA, Meyrin, Switzerland); and Leishmania elongation factor (a purified Leishmania protein; Corixa Corporation, Seattle, Wash.).

[0128] Other systemic adjuvants are adjuvants that create a depot effect and stimulate the immune system. These compounds have both of the above-identified functions of systemic adjuvants. This class of adjuvants includes but is not limited to ISCOMs (Immunostimulating complexes which contain mixed saponins, lipids and form virus-sized particles with pores that can hold antigen; CSL, Melbourne, Australia); AS01 which is a liposome based formulation containing MPL and QS-21 (GlaxoSmithKline, Belgium); AS02 (GlaxoSmithKline, which is an oil-in-water emulsion containing MPL and QS-21: GlaxoSmithKline, Rixensart, Belgium); AS04 (GlaxoSmithKline, which contains alum and MPL; GSK, Belgium); AS15 which is a liposome based formulation containing CpG oligonucleotides, MPL and QS-21 (GlaxoSmithKline, Belgium); non-ionic block copolymers that form micelles such as CRL 1005 (these contain a linear chain of hydrophobic polyoxypropylene flanked by chains of polyoxyethylene; Vaxcel, Inc., Norcross, Ga.); and Syntex Adjuvant Formulation (SAF, an oil-in-water emulsion containing Tween 80 and a nonionic block copolymer; Syntex Chemicals, Inc., Boulder, Colo.).

[0129] The mucosal adjuvants useful according to the invention are adjuvants that are capable of inducing a mucosal immune response in a subject when administered to a mucosal surface in conjunction with complexes disclosed herein. Mucosal adjuvants include CpG nucleic acids (e.g. PCT published patent application WO 99/61056, incorporated herein by reference in its entirety), bacterial toxins: e.g., Cholera toxin (CT), CT derivatives including but not limited to CT B subunit (CTB); CTD53 (Val to Asp); CTK97 (Val to Lys); CTK104 (Tyr to Lys); CTD53/K63 (Val to Asp, Ser to Lys); CTH54 (Arg to His); CTN107 (His to Asn); CTE114 (Ser to Glu); CTE112K (Glu to Lys); CTS61F (Ser to Phe); CTS 106 (Pro to Lys); and CTK63 (Ser to Lys), Zonula occludens toxin (zot), Escherichia coli heat-labile enterotoxin, Labile Toxin (LT), LT derivatives including but not limited to LT B subunit (LTB); LT7K (Arg to Lys); LT61F (Ser to Phe); LT112K (Glu to Lys); LT118E (Gly to Glu); LT146E (Arg to Glu); LT192G (Arg to Gly); LTK63 (Ser to Lys); and LTR72 (Ala to Arg), Pertussis toxin, PT. including PT-9K/129G; Toxin derivatives (see below); Lipid A derivatives (e.g., monophosphoryl lipid A, MPL); Muramyl Dipeptide (MDP) derivatives; bacterial outer membrane proteins (e.g., outer surface protein A (OspA) lipoprotein of Borrelia burgdorferi, outer membrane protein of Neisseria meningitidis); oil-in-water emulsions (e.g., MF59; aluminum salts (Isaka et al., 1998, 1999); and Saponins (e.g., QS-21, e.g., QS-21 Stimulon®, Antigenics LLC, Lexington, Mass.), ISCOMs, MF-59 (a squalene-in-water emulsion stabilized with Span 85 and Tween 80; Chiron Corporation, Emeryville, Calif.); the Seppic ISA series of Montanide adjuvants (e.g., Montanide ISA 720; AirLiquide, Paris, France); PROVAX (an oil-in-water emulsion containing a stabilizing detergent and a micelle-forming agent; DEC Pharmaceuticals Corporation, San Diego, Calif.); Syntext Adjuvant Formulation (SAF; Syntex Chemicals, Inc., Boulder, Colo.); poly [di(carboxylatophenoxy)]phosphazene (PCPP polymer; Virus Research Institute, USA) and Leishmania elongation factor (Corixa Corporation, Seattle, Wash.).

[0130] In certain embodiments, the adjuvant added to the compositions disclosed herein comprises a saponin and/or an immunostimulatory nucleic acid. In certain embodiments, the adjuvant added to the composition comprises or further comprises QS-21.

[0131] In certain embodiments, the adjuvant added to the compositions disclosed herein comprises a Toll-like receptor (TLR) agonist. In certain embodiments, the TLR agonist is an agonist of TLR4. In certain embodiments, the TLR agonist is an agonist of TLR7 and/or TLR8. In certain embodiments, the TLR agonist is an agonist of TLR9. In certain embodiments, the TLR agonist is an agonist of TLR5.

[0132] The compositions disclosed herein described herein may be combined with an adjuvant in several ways. For example, different polypeptides may be mixed together first to form a mixture and then complexed with stress protein(s) and/or adjuvant(s) to form a composition. As another example, different polypeptides may be complexed individually with a stress protein and/or adjuvant(s), and the resulting batches of complexes may then be mixed to form a composition.

[0133] The adjuvant can be administered prior to, during, or following administration of the compositions comprising complexes of stress protein and polypeptides. Administration of the adjuvant and the compositions can be at the same or different administration sites.

### 6.3.4 Unit Dosage Forms

[0134] In another aspect, the instant disclosure provides a unit dosage form of a composition (e.g., pharmaceutical composition or vaccine) disclosed herein.

[0135] The amounts and concentrations of the polypeptides (e.g., antigenic polypeptides), stress proteins, and/or adjuvants at which the efficacy of a vaccine disclosed herein is effective may vary depending on the chemical nature and the potency of the polypeptides, stress proteins, and/or adjuvants. Typically, the starting amounts and concentrations in the vaccine are the ones conventionally used for eliciting the desired immune response, using the conventional routes of administration, e.g., intramuscular injection. The amounts and concentrations of the polypeptides (e.g., antigenic polypeptides), conjugates, stress proteins, and/or adjuvants can then be adjusted, e.g., by dilution using a diluent, so that an effective immune response is achieved as assessed using standard methods known in the art (e.g., determined by the antibody or T-cell response to the vaccine relative to a control formulation).

[0136] In certain embodiments, the total amount of the polypeptides and stress protein in the composition is about 10 μg to 600 μg (e.g., about 50 μg, 100 μg, 200 μg, 300 μg, 400 μg, or 500 μg, optionally about 120 μg, 240 μg, or 480 μg). In certain embodiments, the total amount of the polypeptides and stress protein in the composition is about 300 μg. In certain embodiments, the amount of the stress protein in the composition is about 250 μg to 290 μg.

[0137] In certain embodiments, the amount of the stress protein in the composition is about 10 μg to 600 μg (e.g., about 50 μg, 100 μg, 200 μg, 300 μg, 400 μg, or 500 μg, optionally about 120 μg, 240 μg, or 480 μg). In certain embodiments, the amount of the stress protein in the composition is about 300 μg. The amount of the polypeptide is calculated based on a designated molar ratio and the molecular weight of the polypeptides.

[0138] In certain embodiments, the total molar amount of the polypeptides in the unit dosage form of the composition is about 0.1 to 10 nmol (e.g., about 0.1 nmol, 0.5 nmol, 1 nmol, 2 nmol, 3 nmol, 4 nmol, 5 nmol, 6 nmol, 7 nmol, 8 nmol, 9 nmol, or 10 nmol). In certain embodiments, the total molar amount of the polypeptides in the unit dosage form of the composition is about 4 nmol. In certain embodiments, the total molar amount of the polypeptides in the unit dosage form of the composition is about 5 nmol.

[0139] The molar ratio of total polypeptides to total stress proteins can be any ratio from about 0.01:1 to about 100:1, including but not limited to about 0.01:1, 0.02:1, 0.05:1. 0.1:1. 0.2:1, 0.5:1, 1:1, 1.5:1, 2:1, 2.5:1, 3:1, 4:1, 5:1, 6:1, 7:1, 8:1, 9:1, 10:1, 11:1, 12:1, 13:1, 14:1, 15:1, 16:1, 17:1, 18:1, 19:1, 20:1, 30:1, 40:1, 49:1, up to 100:1. In certain embodiments, the composition comprises a plurality of complexes each comprising a polypeptide and a stress protein, wherein the molar ratio of the polypeptide to the stress protein in each complex is at least about 1:1 (e.g., about 1.5:1, 2:1, 2.5:1, 3:1, 4:1, 5:1, 6:1, 7:1, 8:1, 9:1, 10:1, 11:1, 12:1, 13:1, 14:1, 15:1, 16:1, 17:1, 18:1, 19:1, 20:1, 30:1, 40:1, 49:1, up to 100:1). In certain embodiments, the molar ratio of total polypeptide(s) to total stress protein(s) is about 0.5:1 to 5:1.

[0140] In certain embodiments, the molar ratio of total polypeptide(s) to total stress protein(s) is about 1:1 to 2:1. In certain embodiments, the molar ratio of total polypeptide(s) to total stress protein(s) is about 1:1, 1.25:1, or 1.5:1. Such ratios, particularly the ratios close to 1:1, are advantageous in that the composition does not comprise a great excess of free peptide(s) that is not bound to a stress protein. Since many antigenic peptides comprising WIC-binding peptides tend to comprise hydrophobic regions, an excess amount of free peptide(s) may tend to aggregate during preparation and storage of the composition. Substantial complexation with a stress protein at a molar ratio of total polypeptide(s) to total stress protein(s) close to 1:1 (e.g., 1:1, 1.25:1, 1.5:1, or 2:1) is enabled by a high binding affinity of the polypeptide to the stress protein. Accordingly, in certain embodiments, the polypeptide binds to an HSP (e.g., Hsc70, Hsp70, Hsp90, Hsp110, Grp170, Gp96, or Calreticulin) with a K_{d} lower than 10⁻³ M, 10⁻⁴ M, 10⁻⁵ M, 10⁻⁶ M, 10⁻⁷ M, 10⁻⁸ M, or 10⁻⁹ M. In certain embodiments, the polypeptide binds to Hsc70 (e.g., human Hsc70) with a K_{d} of 10⁻³ M, 10⁻⁴ M, 10⁻⁵ M, 10⁻⁶ M, 10⁻⁷ M, 10⁻⁸ M, 10⁻⁹M, or lower.

[0141] Methods of calculating the amounts of components in the unit dosage form are provided. For example, in certain embodiments, the polypeptides have an average molecular weight of about 3 kD, and the molecular weight of Hsc70 is about 71 kD. Assuming in one embodiment that the total amount of the polypeptides and stress protein in the composition is 300 μg, and the molar ratio of the polypeptides to hsc70 is 1.5:1. The molar amount of Hsc70 can be calculated as 300 μg divided by 71 kD+1.5×3 kD, resulting in about 4.0 nmol, and the mass amount of Hsc70 can be calculated by multiplying the molar amount with 71 kD, resulting in about 280 kD. The total molar amount of the polypeptides can be calculated as 1.5×4.0 nmol, resulting in 6.0 nmol. If 10 different polypeptides are employed, the molar amount of each polypeptide is 0.60 nmol. Assuming in another embodiment that a 300 μg dose of Hsc70 is intended to be included in a unit dosage form, and the molar ratio of polypeptides to Hsc70 is 1.5:1. The total molar amount of the polypeptides can be calculated as 300 μg divided by 71 kD then times 1.5, resulting in 6.3 nmol. If 10 different polypeptides are employed, the molar amount of each polypeptide is 0.63 nmol. In cases where one or more of the variables are different from those in the examples, the quantities of the stress proteins and of the polypeptides are scaled accordingly.

[0142] It is further appreciated that the unit dosage form can optionally comprise one or more adjuvants as disclosed supra. In certain embodiments, the adjuvant comprises a saponin and/or an immunostimulatory nucleic acid. In certain embodiments, the adjuvant comprises or further comprises QS-21. In certain embodiments, the amount of QS-21 in the unit dosage form of composition is 10 μg, 25 μg, 50 μg, 75 μg, 100 μg, 125 μg, 150 μg, 175 μg, or 200 μg. In certain embodiments, the amount of QS-21 in the unit dosage form of composition is 100 μg. In certain embodiments, the adjuvant comprises a Toll-like receptor (TLR) agonist. In certain embodiments, the TLR agonist is an agonist of TLR4. In certain embodiments, the TLR agonist is an agonist of TLR7 and/or TLR8. In certain embodiments, the TLR agonist is an agonist of TLR9. In certain embodiments, the TLR agonist is an agonist of TLR5.

### 6.4 Methods of Use

[0143] The compositions (e.g., pharmaceutical compositions and vaccines, and unit dosage forms thereof) disclosed herein are particularly useful for inducing a cellular immune response. In certain embodiments, stress proteins can deliver antigenic polypeptides through the cross-presentation pathway in antigen presenting cells (APCs) (e.g., macrophages and dendritic cells (DCs) via membrane receptors (mainly CD91) or by binding to Toll-like receptors, thereby leading to activation of CD8⁺ and CD4⁺ T cells. Internalization of a stress protein/antigenic polypeptide complex results in functional maturation of the APCs with chemokine and cytokine production leading to activation of natural killer cells (NK), monocytes and Th1 and Th-2-mediated immune responses.

[0144] In one aspect, the instant disclosure provides a method of inducing a cellular immune response to an antigenic peptide in a subject, the method comprising administering to the subject an effective amount of a composition as disclosed herein. In another aspect, the instant disclosure provides a method of treating a disease (e.g., cancer) in a subject, the method comprising administering to the subject an effective amount of a composition as disclosed herein. The compositions disclosed herein can also be used in preparing a medicament or vaccine for the treatment of a subject.

[0145] In various embodiments, such subjects can be an animal, e.g., a mammal, a non-human primate, and a human. The term “animal” includes companion animals, such as cats and dogs; zoo animals; wild animals, including deer, foxes and raccoons; farm animals, livestock and fowl, including horses, cattle, sheep, pigs, turkeys, ducks, and chickens, and laboratory animals, such as rodents, rabbits, and guinea pigs. In certain embodiments, the subject has cancer.

### 6.4.1 Treatment of Cancer

[0146] The compositions disclosed herein can be used alone or in combination with other therapies for the treatment of cancer. One or more of the MHC-binding peptides disclosed herein can be present in the subject's cancer cells. In certain embodiments, one or more of the MHC-binding peptides are common to or frequently found in the type and/or stage of the cancer. In certain embodiments, one or more MHC-binding peptides are found in greater than 5% of cancers. In certain embodiments, one or more of the WIC-binding peptides are specific to the cancer of the subject.

[0147] Cancers that can be treated using the compositions disclosed herein include, without limitation, a solid tumor, a hematological cancer (e.g., leukemia, lymphoma, myeloma, e.g., multiple myeloma), and a metastatic lesion. In one embodiment, the cancer is a solid tumor. Examples of solid tumors include malignancies, e.g., sarcomas and carcinomas, e.g., adenocarcinomas of the various organ systems, such as those affecting the lung, breast, ovarian, lymphoid, gastrointestinal (e.g., colon), anal, genitals and genitourinary tract (e.g., renal, urothelial, bladder cells, prostate), pharynx, CNS (e.g., brain, neural or glial cells), head and neck, skin (e.g., melanoma), and pancreas, as well as adenocarcinomas which include malignancies such as colon cancers, rectal cancer, renal-cell carcinoma, liver cancer, lung cancer (e.g., non-small cell lung cancer or small cell lung cancer), cancer of the small intestine and cancer of the esophagus. The cancer may be at an early, intermediate, late stage or metastatic cancer. In certain embodiments, the cancer is associated with elevated PD-1 activity (e.g., elevated PD-1 expression).

[0148] In one embodiment, the cancer is chosen from a lung cancer (e.g., lung adenocarcinoma or a non-small cell lung cancer (NSCLC) (e.g., a NSCLC with squamous and/or non-squamous histology, or a NSCLC adenocarcinoma)), a melanoma (e.g., an advanced melanoma), a renal cancer (e.g., a renal cell carcinoma), a liver cancer (e.g., hepatocellular carcinoma or intrahepatic cholangiocellular carcinoma), a myeloma (e.g., a multiple myeloma), a prostate cancer, a breast cancer (e.g., a breast cancer that does not express one, two or all of estrogen receptor, progesterone receptor, or Her2/neu, e.g., a triple negative breast cancer), an ovarian cancer, a colorectal cancer, a pancreatic cancer, a head and neck cancer (e.g., head and neck squamous cell carcinoma (HNSCC), anal cancer, gastro-esophageal cancer (e.g., esophageal squamous cell carcinoma), mesothelioma, nasopharyngeal cancer, thyroid cancer, cervical cancer, epithelial cancer, peritoneal cancer, or a lymphoproliferative disease (e.g., a post-transplant lymphoproliferative disease). In one embodiment, the cancer is NSCLC. In one embodiment, the cancer is a renal cell carcinoma. In one embodiment, the cancer is an ovarian cancer, optionally wherein the ovarian cancer is associated with human papillomavirus (HPV) infection. In a specific embodiment, the ovarian cancer is a platinum-refractory ovarian cancer.

[0149] In one embodiment, the cancer is a hematological cancer, for example, a leukemia, a lymphoma, or a myeloma. In one embodiment, the cancer is a leukemia, for example, acute lymphoblastic leukemia (ALL), acute myelogenous leukemia (AML), acute myeloblastic leukemia (AML), chronic lymphocytic leukemia (CLL), chronic myelogenous leukemia (CML), chronic myeloid leukemia (CML), chronic myelomonocytic leukemia (CMML), chronic lymphocytic leukemia (CLL), or hairy cell leukemia. In one embodiment, the cancer is a lymphoma, for example, B cell lymphoma, diffuse large B-cell lymphoma (DLBCL), activated B-cell like (ABC) diffuse large B cell lymphoma, germinal center B cell (GCB) diffuse large B cell lymphoma, mantle cell lymphoma, Hodgkin lymphoma, non-Hodgkin lymphoma, relapsed non-Hodgkin lymphoma, refractory non-Hodgkin lymphoma, recurrent follicular non-Hodgkin lymphoma, Burkitt lymphoma, small lymphocytic lymphoma, follicular lymphoma, lymphoplasmacytic lymphoma, or extranodal marginal zone lymphoma. In one embodiment the cancer is a myeloma, for example, multiple myeloma.

[0150] In another embodiment, the cancer is chosen from a carcinoma (e.g., advanced or metastatic carcinoma), melanoma or a lung carcinoma, e.g., a non-small cell lung carcinoma.

[0151] In one embodiment, the cancer is a lung cancer, e.g., a lung adenocarcinoma, non-small cell lung cancer or small cell lung cancer.

[0152] In one embodiment, the cancer is a melanoma, e.g., an advanced melanoma. In one embodiment, the cancer is an advanced or unresectable melanoma that does not respond to other therapies. In other embodiments, the cancer is a melanoma with a BRAF mutation (e.g., a BRAF V600 mutation). In yet other embodiments, the compositions disclosed herein is administered after treatment with an anti-CTLA-4 antibody (e.g., ipilimumab) with or without a BRAF inhibitor (e.g., vemurafenib or dabrafenib).

[0153] In another embodiment, the cancer is a hepatocarcinoma, e.g., an advanced hepatocarcinoma, with or without a viral infection, e.g., a chronic viral hepatitis.

[0154] In another embodiment, the cancer is a prostate cancer, e.g., an advanced prostate cancer.

[0155] In yet another embodiment, the cancer is a myeloma, e.g., multiple myeloma.

[0156] In yet another embodiment, the cancer is a renal cancer, e.g., a renal cell carcinoma (RCC) (e.g., a metastatic RCC, clear cell renal cell carcinoma (CCRCC) or kidney papillary cell carcinoma).

[0157] In yet another embodiment, the cancer is chosen from a lung cancer, a melanoma, a renal cancer, a breast cancer, a colorectal cancer, a leukemia, or a metastatic lesion of the cancer.

[0158] In a particular embodiment, the cancer is AML. In another particular embodiment, the cancer is colorectal cancer.

[0159] The compositions disclosed herein may be administered when a cancer is detected, or prior to or during an episode of recurrence.

[0160] Administration can begin at the first sign of cancer or recurrence, followed by boosting doses until at least symptoms are substantially abated and for a period thereafter.

[0161] In some embodiments, the compositions can be administered to a subject with cancer who has undergone tumor resection surgery that results in an insufficient amount of resected tumor tissue (e.g., less than 7 g, less than 6 g, less than 5 g, less than 4 g, less than 3 g, less than 2 g, or less than 1 g of resected tumor tissue) for production of a therapeutically effective amount of an autologous cancer vaccine comprising a representative set of antigens collected from the resected tumor tissue. See, for example, cancer vaccines described in Expert Opin. Biol. Ther. 2009 Febuary; 9(2):179-86; incorporated herein by reference.

[0162] The compositions disclosed herein can also be used for immunization against recurrence of cancers. Prophylactic administration of a composition to an individual can confer protection against a future recurrence of a cancer.

### 6.4.2 Combination Therapy

[0163] Combination therapy refers to the use of compositions disclosed herein, as a first modality, with a second modality to treat cancer. Accordingly, in certain embodiments, the instant disclosure provides a method of inducing a cellular immune response to an antigenic peptide in a subject as disclosed herein, or a method of treating a disease in a subject as disclosed herein, the method comprising administering to the subject an effective amount of (a) a composition as disclosed herein and (b) a second modality.

[0164] In one embodiment, the second modality is a non-HSP modality, e.g., a modality that does not comprise HSP as a component. This approach is commonly termed combination therapy, adjunctive therapy or conjunctive therapy (the terms are used interchangeably). With combination therapy, additive potency or additive therapeutic effect can be observed. Synergistic outcomes are sought where the therapeutic efficacy is greater than additive. The use of combination therapy can also provide better therapeutic profiles than the administration of either the first or the second modality alone.

[0165] The additive or synergistic effect may allow for a reduction in the dosage and/or dosing frequency of either or both modalities to mitigate adverse effects. In certain embodiments, the second modality administered alone is not clinically adequate to treat the subject (e.g., the subject is non-responsive or refractory to the single modality), such that the subject needs an additional modality. In certain embodiments, the subject has responded to the second modality, yet suffers from side effects, relapses, develops resistance, etc., such that the subject needs an additional modality. Methods disclosed herein comprising administration of the compositions disclosed herein to such subjects to improve the therapeutic effectiveness of the second modality. The effectiveness of a treatment modality can be assayed in vivo or in vitro using methods known in the art.

[0166] In one embodiment, a lesser amount of the second modality is required to produce a therapeutic benefit in a subject. In specific embodiments, a reduction of about 10%, 20%, 30%, 40% and 50% of the amount of second modality can be achieved. The amount of the second modality, including amounts in a range that does not produce any observable therapeutic benefits, can be determined by dose-response experiments conducted in animal models by methods well known in the art.

[0167] In certain embodiments, the second modality comprises a TCR, e.g., a soluble TCR or a cell expressing a TCR. In certain embodiments, the second modality comprises a cell expressing a chimeric antigen receptor (CAR). In certain embodiments, the cell expressing the TCR or CAR is a T cell. In a particular embodiment, the TCR or CAR binds to (e.g., specifically binds to) at least one WIC-binding epitope in the composition disclosed herein.

[0168] In certain embodiments, the second modality comprises a TCR mimic antibody. In certain embodiments, the TCR mimic antibody is an antibody that specifically binds to a peptide-WIC complex. Non-limiting examples of TCR mimic antibodies are disclosed in U.S. Pat. No. 9,074,000, U.S. Publication Nos. US 2009/0304679 A1 and US 2014/0134191 A1, all of which are incorporated herein by reference in their entireties. In a particular embodiment, the TCR mimic antibody binds to (e.g., specifically binds to) at least one WIC-binding epitope in the composition disclosed herein.

[0169] In certain embodiments, the second modality comprises a checkpoint targeting agent. In certain embodiments, the checkpoint targeting agent is selected from the group consisting of an antagonist anti-CTLA-4 antibody, an antagonist anti-PD-L1 antibody, an antagonist anti-PD-L2 antibody, an antagonist anti-PD-1 antibody, an antagonist anti-TIM-3 antibody, an antagonist anti-LAG-3 antibody, an antagonist anti-CEACAM1 antibody, an agonist anti-CD137 antibody, an antagonist anti-TIGIT antibody, an antagonist anti-VISTA antibody, an agonist anti-GITR antibody, and an agonist anti-OX40 antibody.

[0170] In certain embodiments, an anti-PD-1 antibody is used as the second modality in methods disclosed herein. In certain embodiments, the anti-PD-1 antibody is nivolumab, also known as BMS-936558 or MDX1106, developed by Bristol-Myers Squibb. In certain embodiments, the anti-PD-1 antibody is pembrolizumab, also known as lambrolizumab or MK-3475, developed by Merck & Co. In certain embodiments, the anti-PD-1 antibody is pidilizumab, also known as CT-011, developed by CureTech. In certain embodiments, the anti-PD-1 antibody is MEDI0680, also known as AMP-514, developed by Medimmune. In certain embodiments, the anti-PD-1 antibody is PDR001 developed by Novartis Pharmaceuticals. In certain embodiments, the anti-PD-1 antibody is REGN2810 developed by Regeneron Pharmaceuticals. In certain embodiments, the anti-PD-1 antibody is PF-06801591 developed by Pfizer. In certain embodiments, the anti-PD-1 antibody is BGB-A317 developed by BeiGene. In certain embodiments, the anti-PD-1 antibody is TSR-042 developed by AnaptysBio and Tesaro. In certain embodiments, the anti-PD-1 antibody is SHR-1210 developed by Hengrui.

[0171] Further non-limiting examples of anti-PD-1 antibodies that may be used in treatment methods disclosed herein are disclosed in the following patents and patent applications, all of which are herein incorporated by reference in their entireties for all purposes: U.S. Pat. Nos. 6,808,710; 7,332,582; 7,488,802; 8,008,449; 8,114,845; 8,168,757; 8,354,509; 8,686,119; 8,735,553; 8,747,847; 8,779,105; 8,927,697; 8,993,731; 9,102,727; 9,205,148; U.S. Publication No. US 2013/0202623 A1; U.S. Publication No. US 2013/0291136 A1; U.S. Publication No. US 2014/0044738 A1; U.S. Publication No. US 2014/0356363 A1; U.S. Publication No. US 2016/0075783 A1; and PCT Publication No. WO 2013/033091 A1; PCT Publication No. WO 2015/036394 A1; PCT Publication No. WO 2014/179664 A2; PCT Publication No. WO 2014/209804 A1; PCT Publication No. WO 2014/206107 A1; PCT Publication No. WO 2015/058573 A1; PCT Publication No. WO 2015/085847 A1; PCT Publication No. WO 2015/200119 A1; PCT Publication No. WO 2016/015685 A1; and PCT Publication No. WO 2016/020856 A1.

[0172] In certain embodiments, an anti-PD-L1 antibody is used as the second modality in methods disclosed herein. In certain embodiments, the anti-PD-L1 antibody is atezolizumab developed by Genentech. In certain embodiments, the anti-PD-L1 antibody is durvalumab developed by AstraZeneca, Celgene and Medimmune. In certain embodiments, the anti-PD-L1 antibody is avelumab, also known as MSB0010718C, developed by Merck Serono and Pfizer. In certain embodiments, the anti-PD-L1 antibody is MDX-1105 developed by Bristol-Myers Squibb. In certain embodiments, the anti-PD-L1 antibody is AMP-224 developed by Amplimmune and GSK.

[0173] Non-limiting examples of anti-PD-L1 antibodies that may be used in treatment methods disclosed herein are disclosed in the following patents and patent applications, all of which are herein incorporated by reference in their entireties for all purposes: U.S. Pat. Nos. 7,943,743; 8,168,179; 8,217,149; 8,552,154; 8,779,108; 8,981,063; 9,175,082; U.S. Publication No. US 2010/0203056 A1; U.S. Publication No. US 2003/0232323 A1; U.S. Publication No. US 2013/0323249 A1; U.S. Publication No. US 2014/0341917 A1; U.S. Publication No. US 2014/0044738 A1; U.S. Publication No. US 2015/0203580 A1; U.S. Publication No. US 2015/0225483 A1; U.S. Publication No. US 2015/0346208 A1; U.S. Publication No. US 2015/0355184 A1; and PCT Publication No. WO 2014/100079 A1; PCT Publication No. WO 2014/022758 A1; PCT Publication No. WO 2014/055897 A2; PCT Publication No. WO 2015/061668 A1; PCT Publication No. WO 2015/109124 A1; PCT Publication No. WO 2015/195163 A1; PCT Publication No. WO 2016/000619 A1; and PCT Publication No. WO 2016/030350 A1.

[0174] In certain embodiments, a compound that targets an immunomodulatory enzyme(s) such as IDO (indoleamine-(2,3)-dioxygenase) and/or TDO (tryptophan 2,3-dioxygenase) is used as the second modality in methods disclosed herein. Therefore, in one embodiment, the compound targets an immunomodulatory enzyme(s), such as an inhibitor of indoleamine-(2,3)-dioxygenase (IDO). In certain embodiments, such compound is selected from the group consisting of epacadostat (Incyte Corp; see, e.g., WO 2010/005958 which is herein incorporated by reference in its entirety), F001287 (Flexus Biosciences/Bristol-Myers Squibb), indoximod (NewLink Genetics), and NLG919 (NewLink Genetics). In one embodiment, the compound is epacadostat. In another embodiment, the compound is F001287. In another embodiment, the compound is indoximod. In another embodiment, the compound is NLG919. In a specific embodiment, an anti-TIM-3 (e.g., human TIM-3) antibody disclosed herein is administered to a subject in combination with an IDO inhibitor for treating cancer. The IDO inhibitor as described herein for use in treating cancer is present in a solid dosage form of a pharmaceutical composition such as a tablet, a pill or a capsule, wherein the pharmaceutical composition includes an IDO inhibitor and a pharmaceutically acceptable excipient. As such, the antibody as described herein and the IDO inhibitor as described herein can be administered separately, sequentially or concurrently as separate dosage forms. In one embodiment, the antibody is administered parenterally, and the IDO inhibitor is administered orally. In particular embodiments, the inhibitor is selected from the group consisting of epacadostat (Incyte Corporation), F001287 (Flexus Biosciences/Bristol-Myers Squibb), indoximod (NewLink Genetics), and NLG919 (NewLink Genetics). Epacadostat has been described in PCT Publication No. WO 2010/005958, which is herein incorporated by reference in its entirety for all purposes. In one embodiment, the inhibitor is epacadostat. In another embodiment, the inhibitor is F001287. In another embodiment, the inhibitor is indoximod. In another embodiment, the inhibitor is NLG919.

[0175] In certain embodiments, the second modality comprises a different vaccine (e.g., a peptide vaccine, a DNA vaccine, or an RNA vaccine) for treating cancer. In certain embodiments, the vaccine is a heat shock protein-based tumor vaccine or a heat shock protein-based pathogen vaccine (e.g., a vaccine as described in WO 2016/183486, which is incorporated herein by reference in its entirety). In a specific embodiment, the second modality comprises a stress protein-based vaccine. For example, in certain embodiments, the second modality comprises a composition as disclosed herein that is different from the first modality. In certain embodiments, the second modality comprises a composition analogous to those disclosed herein except for having a different sequence of the HSP-binding peptide. In certain embodiments, the stress protein-based vaccine is derived from a tumor preparation, such that the immunity elicited by the vaccine is specifically directed against the unique antigenic peptide repertoire expressed by the cancer of each subject.

[0176] In certain embodiments, the second modality comprises one or more adjuvants, such as the ones disclosed supra that may be included in the vaccine formulation disclosed herein. In certain embodiments, the second modality comprises a saponin, an immunostimulatory nucleic acid, and/or QS-21. In certain embodiments, the second modality comprises a Toll-like receptor (TLR) agonist. In certain embodiments, the TLR agonist is an agonist of TLR4. In certain embodiments, the TLR agonist is an agonist of TLR7 and/or TLR8. In certain embodiments, the TLR agonist is an agonist of TLR9. In certain embodiments, the TLR agonist is an agonist of TLR5.

[0177] In certain embodiments, the second modality comprises one or more of the agents selected from the group consisting of lenalidomide, dexamethasone, interleukin-2, recombinant interferon alfa-2b, and peginterferon alfa-2b.

[0178] In certain embodiments, where the pharmaceutical composition is used for treating a subject having cancer, the second modality comprises a chemotherapeutic or a radiotherapeutic. In certain embodiments, the chemotherapeutic agent is a hypomethylating agent (e.g., azacitidine).

[0179] The composition disclosed herein can be administered separately, sequentially, or concurrently from the second modality (e.g., chemotherapeutic, radiotherapeutic, checkpoint targeting agent, IDO inhibitor, vaccine, adjuvant, soluble TCR, cell expressing a TCR, cell expressing a CAR, and/or TCR mimic antibody), by the same or different delivery routes.

### 6.4.3 Dosage Regimen

[0180] The dosage of the compositions disclosed herein, and the dosage of any additional treatment modality if combination therapy is to be administered, depends to a large extent on the weight and general state of health of the subject being treated, as well as the frequency of treatment and the route of administration. Amounts effective for this use will also depend on the stage and severity of the disease and the judgment of the prescribing physician, but generally range for the initial immunization (that is, for therapeutic administration) from about 1.0 μg to about 1000 μg (1 mg) (including, for example, 10, 20, 25, 30, 40, 50, 60, 70, 80, 90, 100, 150, 200, 240, 250, 300, 350, 400, 450, 500, 550, 600, 650, 700, 750, 800, 850, 900, 950, or 1000 μg) of any one of the compositions disclosed herein for a 70 kg patient, followed by boosting dosages of from about 1.0 μg to about 1000 μg of the composition (including, for example, 10, 20, 25, 30, 40, 50, 60, 70, 80, 90, 100, 150, 200, 250, 300, 350, 400, 450, 500, 550, 600, 650, 700, 750, 800, 850, 900, 950, or 1000 μg) pursuant to a boosting regimen over weeks to months depending upon the patient's response and condition by measuring specific CTL activity in the patient's blood. Regimens for continuing therapy, including site, dose and frequency may be guided by the initial response and clinical judgment. Dosage ranges and regimens for adjuvants are known to those in the art, see, e.g., Vogel and Powell, 1995, A Compendium of Vaccine Adjuvants and Excipients; M. F. Powell, M. J. Newman (eds.), Plenum Press, New York, pages 141-228.

[0181] Preferred adjuvants include QS-21, e.g., QS-21 Stimulon®, and CpG oligonucleotides. Exemplary dosage ranges for QS-21 are 1 μg to 200 μg per administration. In other embodiments, dosages for QS-21 can be 10, 25, and 50 μg per administration. In certain embodiments, the adjuvant comprises a Toll-like receptor (TLR) agonist. In certain embodiments, the TLR agonist is an agonist of TLR4. In certain embodiments, the TLR agonist is an agonist of TLR7 and/or TLR8. In certain embodiments, the TLR agonist is an agonist of TLR9. In certain embodiments, the TLR agonist is an agonist of TLR5.

[0182] In certain embodiments, the administered amount of compositions depends on the route of administration and the type of HSPs in the compositions. For example, the amount of HSP in the compositions can range, for example, from 5 to 1000 μg (1 mg) per administration. In certain embodiments, the administered amount of compositions comprising Hsc70-, Hsp70- and/or Gp96-polypeptide complexes is, for example, 5, 10, 20, 25, 30, 40, 50, 60, 70, 80, 90, 100, 200, 250, 300, 400, 500, 600, 700, 750, 800, 900, or 1000 μg. In certain embodiments, the administered amount of the composition is in the range of about 10 to 600 μg per administration and about 5 to 100 μg if the composition is administered intradermally. In certain embodiments, the administered amount of the composition is about 5 μg to 600 μg, about 5 μg to 300 μg, about 5 μg to 150 μg, or about 5 μg to 60 μg. In certain embodiments, the administered amount of the composition is less than 100 μg. In certain embodiments, the administered amount of the composition is about 5 μg, 25 μg, 50 μg, 120 μg, 240 μg, or 480 μg. In certain embodiments, the compositions comprising complexes of stress proteins and polypeptides are purified.

[0183] In one embodiment of a therapeutic regimen, a dosage substantially equivalent to that observed to be effective in smaller non-human animals (e.g., mice or guinea pigs) is effective for human administration, optionally subject to a correction factor not exceeding a fifty-fold increase, based on the relative lymph node sizes in such mammals and in humans. Specifically, interspecies dose-response equivalence for stress proteins (or HSPs) noncovalently bound to or mixed with antigenic molecules for a human dose is estimated as the product of the therapeutic dosage observed in mice and a single scaling ratio, not exceeding a fifty-fold increase. In certain embodiment, the dosages of the composition can be much smaller than the dosage estimated by extrapolation.

[0184] The doses recited above can be given once or repeatedly, such as daily, every other day, weekly, biweekly, or monthly, for a period up to a year or over a year. Doses are preferably given once every 28 days for a period of about 52 weeks or more.

[0185] In one embodiment, the compositions are administered to a subject at reasonably the same time as an additional treatment modality or modalities. This method provides that the two administrations are performed within a time frame of less than one minute to about five minutes, or up to about sixty minutes from each other, for example, at the same doctor's visit.

[0186] In another embodiment, the compositions and an additional treatment modality or modalities are administered concurrently.

[0187] In yet another embodiment the compositions and an additional treatment modality or modalities are administered in a sequence and within a time interval such that the complexes disclosed herein, and the additional treatment modality or modalities can act together to provide an increased benefit than if they were administered alone.

[0188] In another embodiment, the compositions and an additional treatment modality or modalities are administered sufficiently close in time so as to provide the desired therapeutic or prophylactic outcome. Each can be administered simultaneously or separately, in any appropriate form and by any suitable route. In one embodiment, the complexes disclosed herein, and the additional treatment modality or modalities are administered by different routes of administration. In an alternate embodiment, each is administered by the same route of administration. The compositions can be administered at the same or different sites, e.g. arm and leg. When administered simultaneously, the compositions and an additional treatment modality or modalities may or may not be administered in admixture or at the same site of administration by the same route of administration.

[0189] In various embodiments, the compositions and an additional treatment modality or modalities are administered less than 1 hour apart, at about 1 hour apart, 1 hour to 2 hours apart, 2 hours to 3 hours apart, 3 hours to 4 hours apart, 4 hours to 5 hours apart, 5 hours to 6 hours apart, 6 hours to 7 hours apart, 7 hours to 8 hours apart, 8 hours to 9 hours apart, 9 hours to 10 hours apart, 10 hours to 11 hours apart, 11 hours to 12 hours apart, no more than 24 hours apart or no more than 48 hours apart. In other embodiments, the compositions and a vaccine composition are administered 2 to 4 days apart, 4 to 6 days apart, 1 week a part, 1 to 2 weeks apart, 2 to 4 weeks apart, one month apart, 1 to 2 months apart, or 2 or more months apart. In preferred embodiments, the compositions and an additional treatment modality or modalities are administered in a time frame where both are still active. One skilled in the art would be able to determine such a time frame by determining the half-life of each administered component.

[0190] In certain embodiments, the compositions are administered to the subject weekly for at least four weeks. In certain embodiments, after the four weekly doses, at least 2 (e.g., 2, 3, 4, 5, 6, 7, 8, 9, 10, 11, 12, 13, 14, 15, 16, 17, 18, 19, or 20) further doses of the compositions are administered biweekly to the subject. In certain embodiments, the compositions administered as a booster three months after the final weekly or biweekly dose. The booster administered every three months can be administered for the life of the subject (e.g., at least 1, 2, 3, 4, 5, 6, 7, 8, 9, 10, 11, 12, 13, 14, 15, 16, 17, 18, 19, 20, 25, 30, 40, 50, or more years). In certain embodiments, the total number of doses of the compositions administered to the subject is 1, 2, 3, 4, 5, 6, 7, 8, 9, 10, 11, 12, 13, 14, 15, 16, 17, 18, 19, or 20.

[0191] In one embodiment, the compositions and an additional treatment modality or modalities are administered within the same patient visit. In certain embodiments, the compositions are administered prior to the administration of an additional treatment modality or modalities. In an alternate specific embodiment, the compositions are administered subsequent to the administration of an additional treatment modality or modalities.

[0192] In certain embodiments, the compositions and an additional treatment modality or modalities are cyclically administered to a subject. Cycling therapy involves the administration of the compositions for a period of time, followed by the administration of a modality for a period of time and repeating this sequential administration. Cycling therapy can reduce the development of resistance to one or more of the therapies, avoid or reduce the side effects of one of the therapies, and/or improve the efficacy of the treatment. In such embodiments, the disclosure contemplates the alternating administration of the compositions followed by the administration of a modality 4 to 6 days later, preferable 2 to 4 days, later, more preferably 1 to 2 days later, wherein such a cycle may be repeated as many times as desired. In certain embodiments, the compositions and the modality are alternately administered in a cycle of less than 3 weeks, once every two weeks, once every 10 days or once every week. In certain embodiments, the compositions are administered to a subject within a time frame of one hour to twenty-four hours after the administration of a modality. The time frame can be extended further to a few days or more if a slow- or continuous-release type of modality delivery system is used.

### 6.4.4 Routes of Administration

[0193] The compositions disclosed herein may be administered using any desired route of administration. Many methods may be used to introduce the compositions described above, including but not limited to, oral, intradermal, intramuscular, intraperitoneal, intravenous, subcutaneous, mucosal, intranasal, intra-tumoral, and intra-lymph node routes. Non-mucosal routes of administration include, but are not limited to, intradermal and topical administration. Mucosal routes of administration include, but are not limited to, oral, rectal and nasal administration. Advantages of intradermal administration include use of lower doses and rapid absorption, respectively. Advantages of subcutaneous or intramuscular administration include suitability for some insoluble suspensions and oily suspensions, respectively. Preparations for mucosal administrations are suitable in various formulations as described below.

[0194] Solubility and the site of the administration are factors which should be considered when choosing the route of administration of the compositions. The mode of administration can be varied between multiple routes of administration, including those listed above.

[0195] If the compositions are water-soluble, then it may be formulated in an appropriate buffer, for example, phosphate buffered saline or other physiologically compatible solutions, preferably sterile. Alternatively, if a composition has poor solubility in aqueous solvents, then it may be formulated with a non-ionic surfactant such as Tween, or polyethylene glycol. Thus, the compositions may be formulated for administration by inhalation or insufflation (either through the mouth or the nose) or oral, buccal, parenteral, or rectal administration.

[0196] For oral administration, the composition may be in liquid form, for example, solutions, syrups or suspensions, or may be presented as a drug product for reconstitution with water or other suitable vehicle before use. Such a liquid preparation may be prepared by conventional means with pharmaceutically acceptable additives such as suspending agents (e.g., sorbitol syrup, cellulose derivatives or hydrogenated edible fats); emulsifying agents (e.g., lecithin or acacia); non-aqueous vehicles (e.g., almond oil, oily esters, or fractionated vegetable oils); and preservatives (e.g., methyl or propyl-p-hydroxybenzoates or sorbic acid). The compositions may take the form of, for example, tablets or capsules prepared by conventional means with pharmaceutically acceptable excipients such as binding agents (e.g., pre-gelatinized maize starch, polyvinyl pyrrolidone or hydroxypropyl methylcellulose); fillers (e.g., lactose, microcrystalline cellulose or calcium hydrogen phosphate); lubricants (e.g., magnesium stearate, talc or silica); disintegrants (e.g., potato starch or sodium starch glycolate); or wetting agents (e.g., sodium lauryl sulphate). The tablets may be coated by methods well-known in the art.

[0197] The compositions for oral administration may be suitably formulated to be released in a controlled and/or timed manner.

[0198] For buccal administration, the compositions may take the form of tablets or lozenges formulated in conventional manner.

[0199] The preparation may be formulated for parenteral administration by injection, e.g., by bolus injection or continuous infusion. Formulations for injection may be presented in unit dosage form, e.g., in ampoules or in multi-dose containers, with an added preservative. The preparation may take such forms as suspensions, solutions or emulsions in oily or aqueous vehicles, and may contain formulatory agents such as suspending, stabilizing and/or dispersing agents. Alternatively, the active ingredient may be in powder form for constitution with a suitable vehicle, e.g., sterile pyrogen-free water, before use.

[0200] The preparation may also be formulated in a rectal preparation such as a suppository or retention enema, e.g., containing conventional suppository bases such as cocoa butter or other glycerides.

[0201] In addition to the formulations described above, the preparation may also be formulated as a depot preparation. Such long acting formulations may be administered by implantation (for example, subcutaneously or intramuscularly) or by intramuscular injection. Thus, for example, the preparation may be formulated with suitable polymeric or hydrophobic materials (for example, as emulsion in an acceptable oil) or ion exchange resins, or as sparingly soluble derivatives, for example, as a sparingly soluble salt. Liposomes and emulsions are well known examples of delivery vehicles or carriers for hydrophilic drugs.

[0202] For administration by inhalation, the compositions are conveniently delivered in the form of an aerosol spray presentation from pressurized packs or a nebulizer, with the use of a suitable propellant, e.g., dichlorodifluoromethane, trichlorofluoromethane, dichlorotetrafluoroethane, carbon dioxide or other suitable gas. In the case of a pressurized aerosol the dosage unit may be determined by providing a valve to deliver a metered amount. Capsules and cartridges of, e.g., gelatin for use in an inhaler or insufflator may be formulated containing a powder mix of the compound and a suitable powder base such as lactose or starch.

### 6.4.5 Patient (Subject) Evaluation

[0203] Patients treated with the compositions disclosed herein may be tested for an anti-tumor immune response. In this regard, peripheral blood from patients may be obtained and assayed for markers of anti-tumor immunity. Using standard laboratory procedures, leukocytes may be obtained from the peripheral blood and assayed for frequency of different immune cell phenotypes, HLA subtype, and function of anti-tumor immune cells.

[0204] The majority of effector immune cells in the anti-tumor response is CD8⁺ T cells and thus is HLA class I restricted. Using immunotherapeutic strategies in other tumor types, expansion of CD8+ cells that recognize HLA class I restricted antigens is found in a majority of patients. However, other cell types are involved in the anti-tumor immune response, including, for example, CD4+ T cells, and macrophages and dendritic cells, which may act as antigen-presenting cells. Populations of T cells (CD4+, CD8+, and Treg cells), macrophages, and antigen presenting cells may be determined using flow cytometry. HLA typing may be performed using routine methods in the art, such as methods described in Boegel et al. Genome Medicine 2012, 4:102 (seq2HLA), or using a TruSight® HLA sequencing panel (Illumina, Inc.). The HLA subtype of CD8+ T cells may be determined by a complement-dependent microcytotoxicity test.

[0205] To determine if there is an increase in anti-tumor T cell response, an enzyme linked immunospot assay may be performed to quantify the IFNγ-producing peripheral blood mononuclear cells (PBMC). This technique provides an assay for antigen recognition and immune cell function. In some embodiments, subjects who respond clinically to the vaccine may have an increase in tumor-specific T cells and/or IFNγ-producing PBMCs. In some embodiments, immune cell frequency is evaluated using flow cytometry. In some embodiments, antigen recognition and immune cell function is evaluated using enzyme linked immunospot assays.

[0206] In some embodiments, a panel of assays may be performed to characterize the immune response generated to the composition alone or given in combination with standard of care (e.g., maximal surgical resection, radiotherapy, and concomitant and adjuvant chemotherapy with temozolomide for glioblastoma multiforme). In some embodiments, the panel of assays includes one or more of the following tests: whole blood cell count, absolute lymphocyte count, monocyte count, percentage of CD4⁺CD3⁺ T cells, percentage of CD8⁺CD3⁺ T cells, percentage of CD4⁺CD25⁺FoxP3⁺ regulatory T cells and other phenotyping of PBL surface markers, intracellular cytokine staining to detect proinflammatory cytokines at the protein level, qPCR to detect cytokines at the mRNA level and CFSE dilution to assay T cell proliferation.

[0207] In evaluating a subject, a number of other tests may be performed to determine the overall health of the subject. For example, blood samples may be collected from subjects and analyzed for hematology, coagulation times and serum biochemistry. Hematology for CBC may include red blood cell count, platelets, hematocrit, hemoglobin, white blood cell (WBC) count, plus WBC differential to be provided with absolute counts for neutrophils, eosinophils, basophils, lymphocytes, and monocytes. Serum biochemistry may include albumin, alkaline phosphatase, aspartate amino transferase, alanine amino transferase, total bilirubin, BUN, glucose, creatinine, potassium and sodium. Protime (PT) and partial thromboplastin time (PTT) may also be tested. One or more of the following tests may also be conducted: anti-thyroid (anti-microsomal or thyroglobulin) antibody tests, assessment for anti-nuclear antibody, and rheumatoid factor. Urinalysis may be performed to evaluated protein, RBC, and WBC levels in urine. Also, a blood draw to determine histocompatibility leukocyte antigen (HLA) status may be performed.

[0208] In some embodiments, radiologic tumor evaluations are performed one or more times throughout a treatment to evaluate tumor size and status. For example, tumor evaluation scans may be performed within 30 days prior to surgery, within 48 hours after surgery (e.g., to evaluate percentage resection), 1 week (maximum 14 days) prior to the first vaccination (e.g., as a baseline evaluation), and approximately every 8 weeks thereafter for a particular duration. MRI or CT imaging may be used. Typically, the same imaging modality used for the baseline assessment is used for each tumor evaluation visit.

### 6.5 Kits

[0209] Kits are also provided for carrying out the prophylactic and therapeutic methods disclosed herein. The kits may optionally further comprise instructions on how to use the various components of the kits.

[0210] In certain embodiments, the kit comprises a first container containing a composition (e.g., composition comprising stress protein(s) and antigenic polypeptide(s) disclosed herein, and a second container containing one or more adjuvants. The adjuvant can be any adjuvant disclosed herein, e.g., a saponin, an immunostimulatory nucleic acid, or QS-21 (e.g., QS-21 Stimulon®). In certain embodiments, the kit further comprises a third container containing an additional treatment modality. The kit can further comprise an instruction on the indication, dosage regimen, and route of administration of the composition, adjuvant, and additional treatment modality, e.g., as disclosed in herein.

[0211] Alternatively, the kit can comprise the stress protein(s) and antigenic polypeptide(s) of a composition disclosed herein in separate containers. In certain embodiments, the kit comprises a first container containing one or more antigenic polypeptides disclosed herein, and a second container containing a purified stress protein capable of binding to the polypeptide.

[0212] The first container can contain any number of different polypeptides. For example, in certain embodiments, the first container contains no more than 100 different polypeptides, e.g., 2-50, 2-30, 2-20, 5-20, 5-15, 5-10, or 10-15 different polypeptides. In certain embodiments, each of the different polypeptides comprises the same HSP-binding peptide and a different antigenic peptide. In certain embodiments, the total amount of the polypeptide(s) in the first container is a suitable amount for a unit dosage. In certain embodiments, the total amount of the polypeptide(s) in the first container is about 0.1 to 20 nmol (e.g., 3, 4, 5, or 6 nmol).

[0213] The second container can contain any stress protein disclosed herein. In certain embodiments, the stress protein is selected from the group consisting of Hsc70, Hsp70, Hsp90, Hsp110, Grp170, Gp96, or Calreticulin, and a mutant or fusion protein thereof. In certain embodiments, the stress protein is Hsc70 (e.g., human Hsc70). In certain embodiments, the stress protein is a recombinant protein. In certain embodiments, the total amount of the stress protein(s) in the second container is about 10 μg to 600 μg (e.g., 120 μg, 240 μg, or 480 μg). In certain embodiments, the total amount of the stress protein(s) in the second container is about 50 μg, 100 μg, 200 μg, 300 μg, 400 μg, or 500 μg. In certain embodiments, the amount of the stress protein in the composition is about 300 μg. In certain embodiments, the total molar amount of the stress protein(s) in the second container is calculated based on the total molar amount of the polypeptide(s) in the first container, such that the molar ratio of the polypeptide(s) to the stress protein(s) is about 0.5:1 to 5:1 (e.g., about 1:1, 1.25:1, 1.5:1, 2:1, 2.5:1, 3:1, 3.5:1, 4:1, 4.5:1, or 5:1). In certain embodiments, the total amount of the stress protein(s) in the second container is an amount for multiple administrations (e.g., less than or equal to 1 mg, 3 mg, 10 mg, 30 mg, or 100 mg).

[0214] In certain embodiments, the kit further comprises an instruction for preparing a composition from the polypeptide(s) in the first container and the stress protein(s) in the second container (e.g., an instruction for the complexing reaction as disclosed herein).

[0215] In certain embodiments, the kit further comprises a third container containing one or more adjuvants. The adjuvant can be any adjuvant disclosed herein, e.g., a saponin, an immunostimulatory nucleic acid, or QS-21 (e.g., QS-21 Stimulon®). In certain embodiments, the kit further comprises a fourth container containing an additional treatment modality. The kit can further comprise an instruction on the indication, dosage regimen, and route of administration of the composition prepared from the polypeptide(s) and stress protein(s), the adjuvant, and the additional treatment modality, e.g., as disclosed herein.

[0216] In certain embodiments, the composition, polypeptide(s), stress protein(s), adjuvant(s), and additional treatment modality in the containers are present in pre-determined amounts effective to treat cancers. If desired, the compositions can be presented in a pack or dispenser device which may contain one or more unit dosage forms of the compositions. The pack may, for example, comprise metal or plastic foil, such as a blister pack. The pack or dispenser device may be accompanied by instructions for administration

### 7. EXAMPLES

[0217] The examples in this section are offered by way of illustration, and not by way of limitation.

### 7.1 Example 1: Phosphopeptide Synthesis

[0218] The antigenic peptides set forth in SEQ ID NOs: 119, 123, 125, 133, 134, 221, 247, 281, 296, 355, 407, 410, 417, 419, 421, 455, 456, 457, 546, 563, 611, 641, 642, 650, 654, 657, 669, 670, 701, 703, 791, 809, 821, 824, 859, 869, 911, 954, 974, 979, 1016, 1028, 1032, 1049, 1143, 1148, 1149, 1167, 1176, 1179, 1199, 1217, 1218, 1220, 1228, 1232, 1240, 1253, 1254, 1260, 1266, 1267, 1274, 1298, 1300, 1314, 1343, 1350, 1468, 1486, 1493, 1534, 1536, 1539, 1550, 1552, 1561, 1571, 1574, 1598, 1621, 1651, 1658, 1669, 1670, 1683, 1694, 1720, 1735, 1763, 1767, 1779, 1787, 1804, 1811, 1812, 1814, 1818, 1822, 1825, 1867, 1918, 1927, 1981, 2078, 2111, 2255, 2265, 2328, 2331, 2332, 2355, 2363, 2364, 2386, 2400, 2451, 2453, 2454, 2463, 2465, 2467, 2470, 2471, 2472, 2485, 2486, 2505, 2507, 2512, 2525, 2557, 2570, 2580, 2706, 2740, 2747, 2751, 2753, 2784, 2793, 2803, 2813, 2816, 2863, 2872, 2911, 3124, 3199, 3324, 3360, 3553, 3560, 3572, 4052, 4157, 4253, 4477, 4572, 4682, 4690, 4714, 4715, 5231, 5266, 5303, 5654, 5656, 5719, 5766, 5842, 6015, 6074, 6175, 6176, 6330, 6369, 6630, 6747, 6751, 6768, 6868, 6936, 6947, 6973, 6993, 7019, 7069, 7258, 7269, 7271, 7290, 7377, 7388, 7389, 7402, 7413, 7454, 7482, 7498, 7523, 7530, 7531, 7586, 7637, 7646, 7700, 7797, 7830, 8047, 8082, 8119, 8231, 8244, 8470, 8472, 8808, and 8810 were synthesized using standard Fmoc solid-phase chemical synthesis with pre-loaded polystyrene Wang (PS-Wang) resin in a Symphony®X automatic synthesizer (Gyros Protein Technologies Inc®). A sample of the first amino acid loaded resin from the C-terminus was placed in a dry reaction vessel and was charged to each of the 24 reaction/pre-activation vessels. The synthesizer was programmed to run the complete synthesis cycle using O-(1H-6-Chloro benzotriazole-1-yl)-1,1,3,3-tetramethyluronium hexafluorophosphate/N-methylmorpholine HCTU/NMM activation chemistry. The phosphate group was incorporated using N-α-Fmoc-O-benzyl-L-phosphoserine, N-α-Fmoc-O-benzyl-L-phosphothreonine and N-α-Fmoc-O-benzyl-L-phosphotyrosine for serine, threonine and tyrosine respectively. A 5-fold excess of amino acid, 5-fold excess of activating reagent (HCTU) and 10-fold excess of N-methyl morpholine was used for the peptide coupling reaction. The coupling reaction was performed for 10 min with double coupling cycle for any incomplete coupling throughout the synthesis. These steps were repeated until the desired sequence was obtained.

[0219] At the end of the peptide synthesis, the resin was washed with dichloromethane (DCM) and dried. Upon completion of phosphopeptide assembly, the resin was transferred to a cleavage vessel for cleavage of the peptide from the resin. The cleavage reagent (TFA:DTT:Water:TIS at 88:5:5:2 (v/w/v/v)) was mixed with the resin and stirred for 4 hours at 25° C. Crude peptides were isolated from the resin by filtration and evaporated with N₂ gas, followed by precipitation with chilled diethyl ether and storage at 20° C. for 12 hours.

[0220] The precipitated peptides were centrifuged and washed twice with diethyl ether, dried, dissolved in a 1:1 (v/v) mixture of acetonitrile and water, and lyophilized to produce a crude dry powder. The crude peptides were analyzed by reverse phase HPLC with a Luna® C18 analytical column (Phenomenex®, Inc) using a water (0.1% TFA)-acetonitrile (0.1% TFA) gradient. Peptides were further purified by prep-HPLC with a preparative Luna® C18 column (Phenomenex®, Inc) using a water (0.1% TFA)-acetonitrile (0.1% TFA) gradient. Purified fractions were analyzed using analytical HPLC and pure fractions were pooled for subsequent lyophilization. Peptide purity was tested using an analytical Luna® C18-column (Phenomenex®, Inc) and identity confirmed either by LC/MS (6550 Q-TOF, Agilent Technologies®) or MSQ Plus™ (Thermo Electron®, North America).

### 7.2 Example 2: HLA Binding

[0221] In this example, the HLA binding affinity of selected phosphopeptides (synthesized according to the method set forth in Example 1) was determined.

[0222] Phosphopeptides were synthesized according to the methods described in Example 1.

[0223] An AlphaScreen® assay was used to evaluate the binding of peptides to HLA molecules. Donor beads conjugated with streptavidin, and acceptor beads conjugated with the anti-human HLA class I antibody W6/32, were used to assess peptide binding. Biotinylated HLAs (A*02:01, B*07:02, C*07:01, or C*07:02) were mixed with a fixed excess of β2m and the mixtures added to each well of a 384-well microplate. Serial dilutions of the synthesized phosphopeptides were added to the wells, and the resultant HLA/β2/peptide mixtures were incubated overnight at 18° C. W6/32 conjugated acceptor beads were subsequently added to the wells, and the mixture was incubated for 1 hour at 21° C. Streptavidin conjugated donor beads were then added to the wells, and the mixture was incubated for a further 1 hour at 21° C.

[0224] The microplate was read using the PerkinElmer® plate reader, and data were plotted using the Michaelis-Menten equation to determine the K_{d} for each phosphopeptide.

[0225] Table 8 lists the K_{d} of each of the selected phosphopeptides to the indicated HLAs (A*02:01, B*07:02, C*07:01, or C*07:02). NT means that binding was not tested. NB means no binding was detected. LB stands for low binding and indicates that while some binding was observed, it was below the level that would allow accurate calculation of a K_{d}.

TABLE 8
HLA binding characteristics of
selected phosphopeptides

| | SEQ | Kd | Kd | Kd | Kd |
|---|---|---|---|---|---|
| | ID | in nM | in nM | in nM | in nM |
| Peptide | NO: | A*02:01 | B*07:01 | C*07:01 | C*07:02 |
| RTLsHISEA | 2332 | 157 | NB | 380 | LB |
| RVAsPTSGV | 2363 | 241.6 | 227 | LB | NB |
| SIMsPEIQL | 2451 | 83.96 | NB | LB | LB |
| SISsMEVNV | 2453 | 305.9 | NB | NB | NB |
| SISStPPAV | 2454 | 168.8 | NB | NB | NB |
| SLFGGsVKL | 2463 | 53.89 | NB | LB | LB |
| SLFsGDEENA | 2465 | 277.8 | NB | NB | NB |
| SLFsPQNTL | 2467 | 115.8 | LB | LB | LB |
| SLFsSEESNL | 2470 | 466.2 | NB | NB | NB |
| SLFsSEESNLGA | 2471 | 148.7 | NB | NB | NB |
| SLHDIQLsL | 2472 | 31.86 | 642 | 962 | 413 |
| SLQPRSHsV | 2485 | 779.8 | LB | NB | NB |
| SLQsLETSV | 2486 | 120.8 | NB | NB | NB |
| SMSsLSREV | 2505 | 926.6 | NB | NB | NB |
| SMTRsPPRV | 2507 | 701.3 | NB | NB | NB |
| SVKPRRTsL | 2706 | NB | LB | NB | NB |
| TVFsPTLPAA | 2784 | 46.94 | NB | NB | NB |
| VLFSsPPQM | 2793 | 226.7 | NB | LB | NB |
| VLLsPVPEL | 2803 | 149.5 | NB | LB | NB |
| VLYsPQMAL | 2813 | 40.45 | LB | NB | LB |
| VMIGsPKKV | 2816 | LB | NB | NB | NB |
| yLQSRYYRA | 2872 | 255.4 | LB | NB | LB |
| RQAsIELPSMAV | 1812 | 14.8 | NB | NB | NB |
| RIYQyIQSR | 1217 | NB | NT | NT | NT |
| RPRsPTGPSNSFL | 1735 | NB | 360.2 | NT | NT |
| RPRIPsPIGF | 1658 | NB | 84.37 | NT | NT |
| LPRPAsPAL | 1049 | NB | 222.73 | NT | NT |
| RPAFFsPSL | 1486 | NB | 397.5 | NT | NT |
| RPKtPPVVI | 1598 | NB | LB | NT | NT |
| KIKsFEVVF | 642 | LB | NB | NT | NT |
| YRYsPQSFL | 2911 | NB | NB | NT | NT |
| RPFsPREAL | 1552 | NT | 162.72 | NT | NT |
| GPRSASLLsL | 457 | NT | 47.07 | NT | NT |
| SPFKRQLsL | 2525 | NT | 64.68 | NT | NT |
| SPAsPKISL | 2512 | NT | 274.8 | NT | NT |
| RPDVAKRLsL | 1539 | NT | 216.1 | NT | NT |
| RPRPVsPSSLL | 1670 | NT | 186.4 | NT | NT |
| KRFsGTVRL | 911 | NT | NB | NT | NT |
| KAFsPVRSV | 611 | NT | NB | NT | NT |
| RLLsFQRYL | 1300 | 49.72 | NB | NT | NT |
| RLSsPLHFV | 1350 | 90.61 | NT | NT | NT |
| TPRsPPLGL | 2751 | NB | 75.55 | NT | LB |
| TPRsPPLGLI | 2753 | NB | 90.98 | NB | LB |
| QPRtPSPLVL | 1149 | NT | 198.75 | NT | NT |
| GPRSAsLLSL | 456 | NB | 34.09 | NT | NT |
| RPYsPPFFSL | 1804 | NT | 156.7 | NT | NT |
| LPAsPRARL | 1028 | NT | 83.46 | NT | NT |
| RPSsLPDL | 1763 | NB | 369.4 | NT | NT |
| RPRsISVEEF | 1683 | NT | 86.14 | NT | NT |
| RRGsFEVTL | 1918 | NT | NB | 16.58 | 15.87 |
| RRLsFLVSY | 1981 | NT | NT | 1574 | 112.8 |
| RIYQyIQSRF | 1218 | NT | NT | 476.8 | 377.2 |
| RRPsLLSEF | 2078 | NT | NT | 804.1 | 35.69 |
| RRSsFLQVF | 2111 | NT | NB | LB | 18.98 |
| RRIsDPQVF | 1927 | NT | NB | 11.41 | 19.94 |
| RRFsGTAVY | 1867 | NT | NB | 2176 | 16.69 |
| FRRsPTKSSLDY | 355 | NT | NT | NT | 98.63 |
| QPRtPsPLVL | 1148 | NB | LB | NB | NB |
| RQAsIELPSM | 1811 | 20.37 | NB | NB | NB |
| KLIDRTEsL | 670 | 260 | LB | NB | NB |
| GPRSAsLLsL | 455 | 500 | 50 | NB | NB |
| RPTsRLNRL | 1779 | NB | 117.35 | NB | NB |
| RPRPVsPSSL | 1669 | NB | 218 | NB | NB |
| AVRPTRLsL | 221 | NB | 117 | NT | NT |
| GLLGsPVRA | 421 | 431 | NB | NT | NT |
| EPRsPSHSM | 296 | NB | 198.6 | NT | NT |
| RVRsPTRSP | 2400 | NB | 551 | NT | NT |
| RLLsAAENFL | 8808 | 114 | NT | NT | NT |

‘s’, ‘t’ and ‘y’ indicate phosphorylated serine, threonine and tyrosine, respectively.

[0226] The invention is not to be limited in scope by the specific embodiments described herein. Indeed, various modifications disclosed herein in addition to those described will become apparent to those skilled in the art from the foregoing description and accompanying figures. Such modifications are intended to fall within the scope of the appended claims.

[0227] All references (e.g., publications or patents or patent applications) cited herein are incorporated herein by reference in their entirety and for all purposes to the same extent as if each individual reference (e.g., publication or patent or patent application) was specifically and individually indicated to be incorporated by reference in its entirety for all purposes. Other embodiments are within the following claims.

The application's sequence listing, which the Patent Office published only in electronic form, follows.

SEQUENCE LISTING (8810 sequences)

SEQ ID NO: 1 - protein, 7 aa, Artificial Sequence
  Description of Artificial Sequence: Synthetic peptide
  MOD_RES (1)..(1): Asn, Phe, Gln, or absent
  MOD_RES (2)..(2): Trp, Leu, or Phe
  MOD_RES (3)..(3): Leu or Ile
  MOD_RES (4)..(4): Arg, Leu, or Lys
  MOD_RES (5)..(5): Leu, Trp, or Ile
  MOD_RES (6)..(6): Thr, Leu, Phe, Lys, Arg, or Trp
  MOD_RES (7)..(7): Trp, Gly, Lys, or Phe
XXXXXXX

SEQ ID NO: 2 - protein, 6 aa, Artificial Sequence
  Description of Artificial Sequence: Synthetic peptide
  MOD_RES (1)..(1): Trp or Phe
  MOD_RES (3)..(3): Arg or Lys
  MOD_RES (6)..(6): Trp, Phe, or Gly
XLXLTX

SEQ ID NO: 3 - protein, 7 aa, Artificial Sequence
  Description of Artificial Sequence: Synthetic peptide
  MOD_RES (2)..(2): Trp or Phe
  MOD_RES (4)..(4): Arg or Lys
  MOD_RES (7)..(7): Trp, Phe, or Gly
NXLXLTX

SEQ ID NO: 4 - protein, 6 aa, Artificial Sequence
  Description of Artificial Sequence: Synthetic peptide
  MOD_RES (3)..(3): Arg or Lys
  MOD_RES (6)..(6): Trp or Gly
WLXLTX

SEQ ID NO: 5 - protein, 7 aa, Artificial Sequence
  Description of Artificial Sequence: Synthetic peptide
  MOD_RES (4)..(4): Arg or Lys
  MOD_RES (7)..(7): Trp or Gly
NWLXLTX

SEQ ID NO: 6 - protein, 7 aa, Artificial Sequence
  Description of Artificial Sequence: Synthetic peptide
  MOD_RES (3)..(3): Leu or Ile
  MOD_RES (4)..(4): Leu, Arg, or Lys
  MOD_RES (5)..(5): Leu or Ile
  MOD_RES (6)..(6): Thr, Leu, Phe, Lys, Arg, or Trp
  MOD_RES (7)..(7): Trp or Lys
NWXXXXX

SEQ ID NO: 7 - protein, 7 aa, Artificial Sequence
  Description of Artificial Sequence: Synthetic peptide
NLLRLTG

SEQ ID NO: 8 - protein, 6 aa, Artificial Sequence
  Description of Artificial Sequence: Synthetic peptide
WLRLTW

SEQ ID NO: 9 - protein, 7 aa, Artificial Sequence
  Description of Artificial Sequence: Synthetic peptide
NWLRLTW

SEQ ID NO: 10 - protein, 6 aa, Artificial Sequence
  Description of Artificial Sequence: Synthetic peptide
WLKLTW

SEQ ID NO: 11 - protein, 7 aa, Artificial Sequence
  Description of Artificial Sequence: Synthetic peptide
NWLKLTW

SEQ ID NO: 12 - protein, 6 aa, Artificial Sequence
  Description of Artificial Sequence: Synthetic peptide
WLRLTG

SEQ ID NO: 13 - protein, 7 aa, Artificial Sequence
  Description of Artificial Sequence: Synthetic peptide
NWLRLTG

SEQ ID NO: 14 - protein, 6 aa, Artificial Sequence
  Description of Artificial Sequence: Synthetic peptide
FLRLTF

SEQ ID NO: 15 - protein, 7 aa, Artificial Sequence
  Description of Artificial Sequence: Synthetic peptide
NFLRLTF

SEQ ID NO: 16 - protein, 6 aa, Artificial Sequence
  Description of Artificial Sequence: Synthetic peptide
WLRLTF

SEQ ID NO: 17 - protein, 7 aa, Artificial Sequence
  Description of Artificial Sequence: Synthetic peptide
NWLRLTF

SEQ ID NO: 18 - protein, 6 aa, Artificial Sequence
  Description of Artificial Sequence: Synthetic peptide
WLKLTF

SEQ ID NO: 19 - protein, 7 aa, Artificial Sequence
  Description of Artificial Sequence: Synthetic peptide
NWLKLTF

SEQ ID NO: 20 - protein, 6 aa, Artificial Sequence
  Description of Artificial Sequence: Synthetic peptide
WLKLTG

SEQ ID NO: 21 - protein, 7 aa, Artificial Sequence
  Description of Artificial Sequence: Synthetic peptide
NWLKLTG

SEQ ID NO: 22 - protein, 6 aa, Artificial Sequence
  Description of Artificial Sequence: Synthetic peptide
FLRLTW

SEQ ID NO: 23 - protein, 7 aa, Artificial Sequence
  Description of Artificial Sequence: Synthetic peptide
NFLRLTW

SEQ ID NO: 24 - protein, 6 aa, Artificial Sequence
  Description of Artificial Sequence: Synthetic peptide
FLRLTG

SEQ ID NO: 25 - protein, 7 aa, Artificial Sequence
  Description of Artificial Sequence: Synthetic peptide
NFLRLTG

SEQ ID NO: 26 - protein, 6 aa, Artificial Sequence
  Description of Artificial Sequence: Synthetic peptide
FLKLTW

SEQ ID NO: 27 - protein, 7 aa, Artificial Sequence
  Description of Artificial Sequence: Synthetic peptide
NFLKLTW

SEQ ID NO: 28 - protein, 6 aa, Artificial Sequence
  Description of Artificial Sequence: Synthetic peptide
FLKLTF

SEQ ID NO: 29 - protein, 7 aa, Artificial Sequence
  Description of Artificial Sequence: Synthetic peptide
NFLKLTF

SEQ ID NO: 30 - protein, 6 aa, Artificial Sequence
  Description of Artificial Sequence: Synthetic peptide
FLKLTG

SEQ ID NO: 31 - protein, 7 aa, Artificial Sequence
  Description of Artificial Sequence: Synthetic peptide
NFLKLTG

SEQ ID NO: 32 - protein, 7 aa, Artificial Sequence
  Description of Artificial Sequence: Synthetic peptide
NWLLLTW

SEQ ID NO: 33 - protein, 7 aa, Artificial Sequence
  Description of Artificial Sequence: Synthetic peptide
NLLRWTG

SEQ ID NO: 34 - protein, 7 aa, Artificial Sequence
  Description of Artificial Sequence: Synthetic peptide
FWLRLTW

SEQ ID NO: 35 - protein, 7 aa, Artificial Sequence
  Description of Artificial Sequence: Synthetic peptide
NWLRLLW

SEQ ID NO: 36 - protein, 7 aa, Artificial Sequence
  Description of Artificial Sequence: Synthetic peptide
NWLRLFW

SEQ ID NO: 37 - protein, 7 aa, Artificial Sequence
  Description of Artificial Sequence: Synthetic peptide
NWLRLKW

SEQ ID NO: 38 - protein, 7 aa, Artificial Sequence
  Description of Artificial Sequence: Synthetic peptide
NWIRITW

SEQ ID NO: 39 - protein, 7 aa, Artificial Sequence
  Description of Artificial Sequence: Synthetic peptide
QWLRLTW

SEQ ID NO: 40 - protein, 7 aa, Artificial Sequence
  Description of Artificial Sequence: Synthetic peptide
NWLKLKW

SEQ ID NO: 41 - protein, 7 aa, Artificial Sequence
  Description of Artificial Sequence: Synthetic peptide
NWLKLRW

SEQ ID NO: 42 - protein, 7 aa, Artificial Sequence
  Description of Artificial Sequence: Synthetic peptide
NWLKLWK

SEQ ID NO: 43 - protein, 4 aa, Artificial Sequence
  Description of Artificial Sequence: Synthetic peptide
FFRK

SEQ ID NO: 44 - protein, 11 aa, Artificial Sequence
  Description of Artificial Sequence: Synthetic peptide
  MOD_RES (5)..(5): Asn, Phe, Gln, or absent
  MOD_RES (6)..(6): Trp, Leu, or Phe
  MOD_RES (7)..(7): Leu or Ile
  MOD_RES (8)..(8): Arg, Leu, or Lys
  MOD_RES (9)..(9): Leu, Trp, or Ile
  MOD_RES (10)..(10): Thr, Leu, Phe, Lys, Arg, or Trp
  MOD_RES (11)..(11): Trp, Gly, Lys, or Phe
FFRKXXXXXXX

SEQ ID NO: 45 - protein, 10 aa, Artificial Sequence
  Description of Artificial Sequence: Synthetic peptide
  MOD_RES (5)..(5): Trp or Phe
  MOD_RES (7)..(7): Arg or Lys
  MOD_RES (10)..(10): Trp, Phe, or Gly
FFRKXLXLTX

SEQ ID NO: 46 - protein, 11 aa, Artificial Sequence
  Description of Artificial Sequence: Synthetic peptide
  MOD_RES (6)..(6): Trp or Phe
  MOD_RES (8)..(8): Arg or Lys
  MOD_RES (11)..(11): Trp, Phe, or Gly
FFRKNXLXLTX

SEQ ID NO: 47 - protein, 10 aa, Artificial Sequence
  Description of Artificial Sequence: Synthetic peptide
  MOD_RES (7)..(7): Arg or Lys
  MOD_RES (10)..(10): Trp or Gly
FFRKWLXLTX

SEQ ID NO: 48 - protein, 11 aa, Artificial Sequence
  Description of Artificial Sequence: Synthetic peptide
  MOD_RES (8)..(8): Arg or Lys
  MOD_RES (11)..(11): Trp or Gly
FFRKNWLXLTX

SEQ ID NO: 49 - protein, 11 aa, Artificial Sequence
  Description of Artificial Sequence: Synthetic peptide
  MOD_RES (7)..(7): Leu or Ile
  MOD_RES (8)..(8): Leu, Arg, or Lys
  MOD_RES (9)..(9): Leu or Ile
  MOD_RES (10)..(10): Thr, Leu, Phe, Lys, Arg, or Trp
  MOD_RES (11)..(11): Trp or Lys
FFRKNWXXXXX

SEQ ID NO: 50 - protein, 11 aa, Artificial Sequence
  Description of Artificial Sequence: Synthetic peptide
FFRKNLLRLTG

SEQ ID NO: 51 - protein, 9 aa, Artificial Sequence
  Description of Artificial Sequence: Synthetic peptide
FRNLLRLTG

SEQ ID NO: 52 - protein, 11 aa, Artificial Sequence
  Description of Artificial Sequence: Synthetic peptide
FFRKNLLRLTG

SEQ ID NO: 53 - protein, 11 aa, Artificial Sequence
  Description of Artificial Sequence: Synthetic peptide
FFRKNWLLLTW

SEQ ID NO: 54 - protein, 11 aa, Artificial Sequence
  Description of Artificial Sequence: Synthetic peptide
FFRKNLLRWTG

SEQ ID NO: 55 - protein, 11 aa, Artificial Sequence
  Description of Artificial Sequence: Synthetic peptide
FFRKNWLRLTW

SEQ ID NO: 56 - protein, 11 aa, Artificial Sequence
  Description of Artificial Sequence: Synthetic peptide
FFRKNWLKLTW

SEQ ID NO: 57 - protein, 11 aa, Artificial Sequence
  Description of Artificial Sequence: Synthetic peptide
FFRKNWIRITW

SEQ ID NO: 58 - protein, 11 aa, Artificial Sequence
  Description of Artificial Sequence: Synthetic peptide
FFRKQWLRLTW

SEQ ID NO: 59 - protein, 11 aa, Artificial Sequence
  Description of Artificial Sequence: Synthetic peptide
FFRKNWLRLTG

SEQ ID NO: 60 - protein, 11 aa, Artificial Sequence
  Description of Artificial Sequence: Synthetic peptide
FFRKNFLRLTF

SEQ ID NO: 61 - protein, 9 aa, Artificial Sequence
  Description of Artificial Sequence: Synthetic peptide
FRNWLRLTW

SEQ ID NO: 62 - protein, 9 aa, Artificial Sequence
  Description of Artificial Sequence: Synthetic peptide
FRNWLKLTW

SEQ ID NO: 63 - protein, 9 aa, Artificial Sequence
  Description of Artificial Sequence: Synthetic peptide
FRNWLRLTG

SEQ ID NO: 64 - protein, 9 aa, Artificial Sequence
  Description of Artificial Sequence: Synthetic peptide
FRNFLRLTF

SEQ ID NO: 65 - protein, 11 aa, Artificial Sequence
  Description of Artificial Sequence: Synthetic peptide
FFRKNWLKLKW

SEQ ID NO: 66 - protein, 11 aa, Artificial Sequence
  Description of Artificial Sequence: Synthetic peptide
FFRKNWLKLRW

SEQ ID NO: 67 - protein, 11 aa, Artificial Sequence
  Description of Artificial Sequence: Synthetic peptide
FFRKNWLKLWK

SEQ ID NO: 68 - protein, 11 aa, Artificial Sequence
  Description of Artificial Sequence: Synthetic peptide
  MOD_RES (1)..(1): Asn, Phe, Gln, or absent
  MOD_RES (2)..(2): Trp, Leu, or Phe
  MOD_RES (3)..(3): Leu or Ile
  MOD_RES (4)..(4): Arg, Leu, or Lys
  MOD_RES (5)..(5): Leu, Trp, or Ile
  MOD_RES (6)..(6): Thr, Leu, Phe, Lys, Arg, or Trp
  MOD_RES (7)..(7): Trp, Gly, Lys, or Phe
XXXXXXXFFRK

SEQ ID NO: 69 - protein, 10 aa, Artificial Sequence
  Description of Artificial Sequence: Synthetic peptide
  MOD_RES (1)..(1): Trp or Phe
  MOD_RES (3)..(3): Arg or Lys
  MOD_RES (6)..(6): Trp, Phe, or Gly
XLXLTXFFRK

SEQ ID NO: 70 - protein, 11 aa, Artificial Sequence
  Description of Artificial Sequence: Synthetic peptide
  MOD_RES (2)..(2): Trp or Phe
  MOD_RES (4)..(4): Arg or Lys
  MOD_RES (7)..(7): Trp, Phe, or Gly
NXLXLTXFFRK

SEQ ID NO: 71 - protein, 10 aa, Artificial Sequence
  Description of Artificial Sequence: Synthetic peptide
  MOD_RES (3)..(3): Arg or Lys
  MOD_RES (6)..(6): Trp or Gly
WLXLTXFFRK

SEQ ID NO: 72 - protein, 11 aa, Artificial Sequence
  Description of Artificial Sequence: Synthetic peptide
  MOD_RES (4)..(4): Arg or Lys
  MOD_RES (7)..(7): Trp or Gly
NWLXLTXFFRK

SEQ ID NO: 73 - protein, 11 aa, Artificial Sequence
  Description of Artificial Sequence: Synthetic peptide
  MOD_RES (3)..(3): Leu or Ile
  MOD_RES (4)..(4): Leu, Arg, or Lys
  MOD_RES (5)..(5): Leu or Ile
  MOD_RES (6)..(6): Thr, Leu, Phe, Lys, Arg, or Trp
  MOD_RES (7)..(7): Trp or Lys
NWXXXXXFFRK

SEQ ID NO: 74 - protein, 11 aa, Artificial Sequence
  Description of Artificial Sequence: Synthetic peptide
NLLRLTGFFRK

SEQ ID NO: 75 - protein, 9 aa, Artificial Sequence
  Description of Artificial Sequence: Synthetic peptide
NLLRLTGFR

SEQ ID NO: 76 - protein, 11 aa, Artificial Sequence
  Description of Artificial Sequence: Synthetic peptide
NWLRLTWFFRK

SEQ ID NO: 77 - protein, 11 aa, Artificial Sequence
  Description of Artificial Sequence: Synthetic peptide
NWLKLTWFFRK

SEQ ID NO: 78 - protein, 11 aa, Artificial Sequence
  Description of Artificial Sequence: Synthetic peptide
NWLRLTGFFRK

SEQ ID NO: 79 - protein, 11 aa, Artificial Sequence
  Description of Artificial Sequence: Synthetic peptide
NFLRLTFFFRK

SEQ ID NO: 80 - protein, 9 aa, Artificial Sequence
  Description of Artificial Sequence: Synthetic peptide
NWLRLTWFR

SEQ ID NO: 81 - protein, 9 aa, Artificial Sequence
  Description of Artificial Sequence: Synthetic peptide
NWLKLTWFR

SEQ ID NO: 82 - protein, 9 aa, Artificial Sequence
  Description of Artificial Sequence: Synthetic peptide
NWLRLTGFR

SEQ ID NO: 83 - protein, 9 aa, Artificial Sequence
  Description of Artificial Sequence: Synthetic peptide
NFLRLTFFR

SEQ ID NO: 84 - protein, 11 aa, Artificial Sequence
  Description of Artificial Sequence: Synthetic peptide
NLLRLTWFFRK

SEQ ID NO: 85 - protein, 11 aa, Artificial Sequence
  Description of Artificial Sequence: Synthetic peptide
NRLLLTGFFRK

SEQ ID NO: 86 - protein, 11 aa, Artificial Sequence
  Description of Artificial Sequence: Synthetic peptide
NWLLLTWFFRK

SEQ ID NO: 87 - protein, 11 aa, Artificial Sequence
  Description of Artificial Sequence: Synthetic peptide
NLLRWTGFFRK

SEQ ID NO: 88 - protein, 11 aa, Artificial Sequence
  Description of Artificial Sequence: Synthetic peptide
NRLWLTGFFRK

SEQ ID NO: 89 - protein, 11 aa, Artificial Sequence
  Description of Artificial Sequence: Synthetic peptide
FWLRLTWFFRK

SEQ ID NO: 90 - protein, 11 aa, Artificial Sequence
  Description of Artificial Sequence: Synthetic peptide
NWLRLLWFFRK

SEQ ID NO: 91 - protein, 11 aa, Artificial Sequence
  Description of Artificial Sequence: Synthetic peptide
NWLRLFWFFRK

SEQ ID NO: 92 - protein, 11 aa, Artificial Sequence
  Description of Artificial Sequence: Synthetic peptide
NWLRLKWFFRK

SEQ ID NO: 93 - protein, 11 aa, Artificial Sequence
  Description of Artificial Sequence: Synthetic peptide
NWIRITWFFRK

SEQ ID NO: 94 - protein, 11 aa, Artificial Sequence
  Description of Artificial Sequence: Synthetic peptide
QWLRLTWFFRK

SEQ ID NO: 95 - protein, 11 aa, Artificial Sequence
  Description of Artificial Sequence: Synthetic peptide
NWLKLKWFFRK

SEQ ID NO: 96 - protein, 11 aa, Artificial Sequence
  Description of Artificial Sequence: Synthetic peptide
NWLKLRWFFRK

SEQ ID NO: 97 - protein, 11 aa, Artificial Sequence
  Description of Artificial Sequence: Synthetic peptide
NWLKLWKFFRK

SEQ ID NO: 98 - protein, 22 aa, Artificial Sequence
  Description of Artificial Sequence: Synthetic peptide
  MOD_RES (1)..(1): N-terminally acetylated serine
  MOD_RES (16)..(16): phosphorylated serine
SAARESHPHGVKRSASPDDDLG

SEQ ID NO: 99 - protein, 8 aa, Artificial Sequence
  Description of Artificial Sequence: Synthetic peptide
  MOD_RES (4)..(4): phosphorylated serine
AAESPSFL

SEQ ID NO: 100 - protein, 13 aa, Artificial Sequence
  Description of Artificial Sequence: Synthetic peptide
  MOD_RES (7)..(7): phosphorylated serine
AASNFKSPVKTIR

SEQ ID NO: 101 - protein, 9 aa, Artificial Sequence
  Description of Artificial Sequence: Synthetic peptide
  MOD_RES (4)..(4): phosphorylated serine
ADLSPEREV

SEQ ID NO: 102 - protein, 11 aa, Artificial Sequence
  Description of Artificial Sequence: Synthetic peptide
  MOD_RES (7)..(7): phosphorylated threonine
AEDEIGTPRKF

SEQ ID NO: 103 - protein, 11 aa, Artificial Sequence
  Description of Artificial Sequence: Synthetic peptide
  MOD_RES (7)..(7): phosphorylated threonine
AEDEIGTPRKY

SEQ ID NO: 104 - protein, 11 aa, Artificial Sequence
  Description of Artificial Sequence: Synthetic peptide
  MOD_RES (7)..(7): phosphorylated threonine
AEEEIGTPRKF

SEQ ID NO: 105 - protein, 11 aa, Artificial Sequence
  Description of Artificial Sequence: Synthetic peptide
  MOD_RES (7)..(7): phosphorylated threonine
AEEEIGTPRKW

SEQ ID NO: 106 - protein, 11 aa, Artificial Sequence
  Description of Artificial Sequence: Synthetic peptide
  MOD_RES (7)..(7): phosphorylated threonine
AEEEIGTPRKY

SEQ ID NO: 107 - protein, 9 aa, Artificial Sequence
  Description of Artificial Sequence: Synthetic peptide
  MOD_RES (8)..(8): phosphorylated serine
AENARSASF

SEQ ID NO: 108 - protein, 10 aa, Artificial Sequence
  Description of Artificial Sequence: Synthetic peptide
  MOD_RES (4)..(4): phosphorylated serine
AENSPTRQQF

SEQ ID NO: 109 - protein, 10 aa, Artificial Sequence
  Description of Artificial Sequence: Synthetic peptide
  MOD_RES (4)..(4): phosphorylated serine
AENSPTRQQW

SEQ ID NO: 110 - protein, 10 aa, Artificial Sequence
  Description of Artificial Sequence: Synthetic peptide
  MOD_RES (4)..(4): phosphorylated serine
AENSPTRQQY

SEQ ID NO: 111 - protein, 9 aa, Artificial Sequence
  Description of Artificial Sequence: Synthetic peptide
  MOD_RES (4)..(4): phosphorylated serine
AENSSSREL

SEQ ID NO: 112 - protein, 10 aa, Artificial Sequence
  Description of Artificial Sequence: Synthetic peptide
  MOD_RES (5)..(5): phosphorylated serine
AEQGSPRVSY

SEQ ID NO: 113 - protein, 11 aa, Artificial Sequence
  Description of Artificial Sequence: Synthetic peptide
  MOD_RES (4)..(4): phosphorylated serine
AESSPTAGKKF

SEQ ID NO: 114 - protein, 11 aa, Artificial Sequence
  Description of Artificial Sequence: Synthetic peptide
  MOD_RES (4)..(4): phosphorylated serine
AESSPTAGKKL

SEQ ID NO: 115 - protein, 11 aa, Artificial Sequence
  Description of Artificial Sequence: Synthetic peptide
  MOD_RES (4)..(4): phosphorylated serine
AESSPTAGKKW

SEQ ID NO: 116 - protein, 11 aa, Artificial Sequence
  Description of Artificial Sequence: Synthetic peptide
  MOD_RES (4)..(4): phosphorylated serine
AESSPTAGKKY

SEQ ID NO: 117 - protein, 9 aa, Artificial Sequence
  Description of Artificial Sequence: Synthetic peptide
  MOD_RES (4)..(4): phosphorylated serine
AGDSPGSQF

SEQ ID NO: 118 - protein, 9 aa, Artificial Sequence
  Description of Artificial Sequence: Synthetic peptide
  MOD_RES (4)..(4): phosphorylated serine
AILSPAFKV

SEQ ID NO: 119 - protein, 9 aa, Artificial Sequence
  Description of Artificial Sequence: Synthetic peptide
  MOD_RES (5)..(5): phosphorylated serine
AIMRSPQMV

SEQ ID NO: 120 - protein, 8 aa, Artificial Sequence
  Description of Artificial Sequence: Synthetic peptide
  MOD_RES (3)..(3): phosphorylated serine
AISDLQQL

SEQ ID NO: 121 - protein, 8 aa, Artificial Sequence
  Description of Artificial Sequence: Synthetic peptide
  MOD_RES (4)..(4): phosphorylated serine
AKLSETIS

SEQ ID NO: 122 - protein, 9 aa, Artificial Sequence
  Description of Artificial Sequence: Synthetic peptide
  MOD_RES (5)..(5): phosphorylated serine
ALAASPHAV

SEQ ID NO: 123 - protein, 11 aa, Artificial Sequence
  Description of Artificial Sequence: Synthetic peptide
  MOD_RES (4)..(4): phosphorylated serine
ALDSGASLLHL

SEQ ID NO: 124 - protein, 11 aa, Artificial Sequence
  Description of Artificial Sequence: Synthetic peptide
  MOD_RES (4)..(4): phosphorylated serine
ALDSGASLLHV

SEQ ID NO: 125 - protein, 9 aa, Artificial Sequence
  Description of Artificial Sequence: Synthetic peptide
  MOD_RES (5)..(5): phosphorylated threonine
ALGNTPPFL

SEQ ID NO: 126 - protein, 11 aa, Artificial Sequence
  Description of Artificial Sequence: Synthetic peptide
  MOD_RES (4)..(4): phosphorylated serine
ALGSRESLATI

SEQ ID NO: 127 - protein, 11 aa, Artificial Sequence
  Description of Artificial Sequence: Synthetic peptide
  MOD_RES (4)..(4): phosphorylated serine
ALGSRESLATV

SEQ ID NO: 128 - protein, 9 aa, Artificial Sequence
  Description of Artificial Sequence: Synthetic peptide
  MOD_RES (6)..(6): phosphorylated serine
ALIHQSLGL

SEQ ID NO: 129 - protein, 9 aa, Artificial Sequence
  Description of Artificial Sequence: Synthetic peptide
  MOD_RES (6)..(6): phosphorylated serine
ALIHQSLGV

SEQ ID NO: 130 - protein, 13 aa, Artificial Sequence
  Description of Artificial Sequence: Synthetic peptide
  MOD_RES (7)..(7): phosphorylated serine
ALLGSKSPDPYRL

SEQ ID NO: 131 - protein, 13 aa, Artificial Sequence
  Description of Artificial Sequence: Synthetic peptide
  MOD_RES (7)..(7): phosphorylated serine
ALLGSKSPDPYRV

SEQ ID NO: 132 - protein, 9 aa, Artificial Sequence
  Description of Artificial Sequence: Synthetic peptide
  MOD_RES (4)..(4): phosphorylated serine
ALLSLLKRV

SEQ ID NO: 133 - protein, 9 aa, Artificial Sequence
  Description of Artificial Sequence: Synthetic peptide
  MOD_RES (5)..(5): phosphorylated serine
ALMGSPQLV

SEQ ID NO: 134 - protein, 11 aa, Artificial Sequence
  Description of Artificial Sequence: Synthetic peptide
  MOD_RES (5)..(5): phosphorylated serine
ALMGSPQLVAA

SEQ ID NO: 135 - protein, 10 aa, Artificial Sequence
  Description of Artificial Sequence: Synthetic peptide
  MOD_RES (5)..(5): phosphorylated serine
ALRSSPIMRK

SEQ ID NO: 136 - protein, 10 aa, Artificial Sequence
  Description of Artificial Sequence: Synthetic peptide
  MOD_RES (5)..(5): phosphorylated serine
ALRSSPIMRY

SEQ ID NO: 137 - protein, 11 aa, Artificial Sequence
  Description of Artificial Sequence: Synthetic peptide
  MOD_RES (4)..(4): phosphorylated serine
ALVSPPALHNA

SEQ ID NO: 138 - protein, 11 aa, Artificial Sequence
  Description of Artificial Sequence: Synthetic peptide
  MOD_RES (4)..(4): phosphorylated serine
ALVSPPALHNV

SEQ ID NO: 139 - protein, 9 aa, Artificial Sequence
  Description of Artificial Sequence: Synthetic peptide
  MOD_RES (4)..(4): phosphorylated serine
ALYSGVHKK

SEQ ID NO: 140 - protein, 9 aa, Artificial Sequence
  Description of Artificial Sequence: Synthetic peptide
  MOD_RES (4)..(4): phosphorylated serine
ALYSGVHKY

SEQ ID NO: 141 - protein, 10 aa, Artificial Sequence
  Description of Artificial Sequence: Synthetic peptide
  MOD_RES (4)..(4): phosphorylated serine
ALYSPAQPSL

SEQ ID NO: 142 - protein, 10 aa, Artificial Sequence
  Description of Artificial Sequence: Synthetic peptide
  MOD_RES (4)..(4): phosphorylated serine
ALYSPAQPSV

SEQ ID NO: 143 - protein, 9 aa, Artificial Sequence
  Description of Artificial Sequence: Synthetic peptide
  MOD_RES (4)..(4): phosphorylated threonine
ALYTPQAPK

SEQ ID NO: 144 - protein, 9 aa, Artificial Sequence
  Description of Artificial Sequence: Synthetic peptide
  MOD_RES (4)..(4): phosphorylated threonine
ALYTPQAPY

SEQ ID NO: 145 - protein, 9 aa, Artificial Sequence
  Description of Artificial Sequence: Synthetic peptide
  MOD_RES (5)..(5): phosphorylated serine
AMAASPHAV

SEQ ID NO: 146 - protein, 11 aa, Artificial Sequence
  Description of Artificial Sequence: Synthetic peptide
  MOD_RES (4)..(4): phosphorylated serine
AMDSGASLLHL

SEQ ID NO: 147 - protein, 11 aa, Artificial Sequence
  Description of Artificial Sequence: Synthetic peptide
  MOD_RES (4)..(4): phosphorylated serine
AMDSGASLLHV

SEQ ID NO: 148 - protein, 11 aa, Artificial Sequence
  Description of Artificial Sequence: Synthetic peptide
  MOD_RES (4)..(4): phosphorylated serine
AMGSRESLATI

SEQ ID NO: 149 - protein, 11 aa, Artificial Sequence
  Description of Artificial Sequence: Synthetic peptide
  MOD_RES (4)..(4): phosphorylated serine
AMGSRESLATV

SEQ ID NO: 150 - protein, 13 aa, Artificial Sequence
  Description of Artificial Sequence: Synthetic peptide
  MOD_RES (7)..(7): phosphorylated serine
AMLGSKSPDPYRL

SEQ ID NO: 151 - protein, 13 aa, Artificial Sequence
  Description of Artificial Sequence: Synthetic peptide
  MOD_RES (7)..(7): phosphorylated serine
AMLGSKSPDPYRV

SEQ ID NO: 152 - protein, 9 aa, Artificial Sequence
  Description of Artificial Sequence: Synthetic peptide
  MOD_RES (5)..(5): phosphorylated serine
AMPGSPVEV

SEQ ID NO: 153 - protein, 10 aa, Artificial Sequence
  Description of Artificial Sequence: Synthetic peptide
  MOD_RES (5)..(5): phosphorylated serine
AMRSSPIMRK

SEQ ID NO: 154 - protein, 11 aa, Artificial Sequence
  Description of Artificial Sequence: Synthetic peptide
  MOD_RES (4)..(4): phosphorylated serine
AMVSPPALHNA

SEQ ID NO: 155 - protein, 11 aa, Artificial Sequence
  Description of Artificial Sequence: Synthetic peptide
  MOD_RES (4)..(4): phosphorylated serine
AMVSPPALHNV

SEQ ID NO: 156 - protein, 9 aa, Artificial Sequence
  Description of Artificial Sequence: Synthetic peptide
  MOD_RES (4)..(4): phosphorylated serine
AMYSGVHKK

SEQ ID NO: 157 - protein, 9 aa, Artificial Sequence
  Description of Artificial Sequence: Synthetic peptide
  MOD_RES (4)..(4): phosphorylated serine
APDSPRAFL

SEQ ID NO: 158 - protein, 9 aa, Artificial Sequence
  Description of Artificial Sequence: Synthetic peptide
  MOD_RES (8)..(8): phosphorylated serine
APLARASSL

SEQ ID NO: 159 - protein, 9 aa, Artificial Sequence
  Description of Artificial Sequence: Synthetic peptide
  MOD_RES (9)..(9): phosphorylated serine
APPAYEKLS

SEQ ID NO: 160 - protein, 12 aa, Artificial Sequence
  Description of Artificial Sequence: Synthetic peptide
  MOD_RES (9)..(9): phosphorylated serine
APPAYEKLSAEQ

SEQ ID NO: 161 - protein, 15 aa, Artificial Sequence
  Description of Artificial Sequence: Synthetic peptide
  MOD_RES (9)..(9): phosphorylated serine
APPAYEKLSAEQSPP

SEQ ID NO: 162 - protein, 16 aa, Artificial Sequence
  Description of Artificial Sequence: Synthetic peptide
  MOD_RES (9)..(9): phosphorylated serine
APPAYEKLSAEQSPPP

SEQ ID NO: 163 - protein, 17 aa, Artificial Sequence
  Description of Artificial Sequence: Synthetic peptide
  MOD_RES (9)..(9): phosphorylated serine
APPAYEKLSAEQSPPPY

SEQ ID NO: 164 - protein, 25 aa, Artificial Sequence
  Description of Artificial Sequence: Synthetic peptide
  MOD_RES (13)..(13): phosphorylated serine
APPPLVPAPRPSSPPRGPGPARADR

SEQ ID NO: 165 - protein, 12 aa, Artificial Sequence
  Description of Artificial Sequence: Synthetic peptide
  MOD_RES (6)..(6): phosphorylated serine
APRAPSASPLAL

SEQ ID NO: 166 - protein, 10 aa, Artificial Sequence
  Description of Artificial Sequence: Synthetic peptide
  MOD_RES (9)..(9): phosphorylated serine
APRDRRAVSF

SEQ ID NO: 167 - protein, 10 aa, Artificial Sequence
  Description of Artificial Sequence: Synthetic peptide
  MOD_RES (6)..(6): phosphorylated serine
APRKGSFSAL

SEQ ID NO: 168 - protein, 11 aa, Artificial Sequence
  Description of Artificial Sequence: Synthetic peptide
  MOD_RES (6)..(6): phosphorylated serine
APRKGSFSALF

SEQ ID NO: 169 - protein, 11 aa, Artificial Sequence
  Description of Artificial Sequence: Synthetic peptide
  MOD_RES (6)..(6): phosphorylated serine
APRKGSFSALL

SEQ ID NO: 170 - protein, 11 aa, Artificial Sequence
  Description of Artificial Sequence: Synthetic peptide
  MOD_RES (6)..(6): phosphorylated serine
APRKGSFSALM

SEQ ID NO: 171 - protein, 11 aa, Artificial Sequence
  Description of Artificial Sequence: Synthetic peptide
  MOD_RES (6)..(6): phosphorylated serine
APRKGSFSALV

SEQ ID NO: 172 - protein, 10 aa, Artificial Sequence
  Description of Artificial Sequence: Synthetic peptide
  MOD_RES (6)..(6): phosphorylated serine
APRNGSGVAL

SEQ ID NO: 173 - protein, 9 aa, Artificial Sequence
  Description of Artificial Sequence: Synthetic peptide
  MOD_RES (6)..(6): phosphorylated serine
APRRYSSSF

SEQ ID NO: 174 - protein, 9 aa, Artificial Sequence
  Description of Artificial Sequence: Synthetic peptide
  MOD_RES (6)..(6): phosphorylated serine
APRRYSSSL

SEQ ID NO: 175 - protein, 9 aa, Artificial Sequence
  Description of Artificial Sequence: Synthetic peptide
  MOD_RES (6)..(6): phosphorylated serine
APRRYSSSM

SEQ ID NO: 176 - protein, 9 aa, Artificial Sequence
  Description of Artificial Sequence: Synthetic peptide
  MOD_RES (6)..(6): phosphorylated serine
APRRYSSSV

SEQ ID NO: 177 - protein, 10 aa, Artificial Sequence
  Description of Artificial Sequence: Synthetic peptide
  MOD_RES (4)..(4): phosphorylated serine
APRSPPPSRF

SEQ ID NO: 178 - protein, 10 aa, Artificial Sequence
  Description of Artificial Sequence: Synthetic peptide
  MOD_RES (4)..(4): phosphorylated serine
APRSPPPSRL

SEQ ID NO: 179 - protein, 10 aa, Artificial Sequence
  Description of Artificial Sequence: Synthetic peptide
  MOD_RES (4)..(4): phosphorylated serine
APRSPPPSRM

SEQ ID NO: 180 - protein, 10 aa, Artificial Sequence
  Description of Artificial Sequence: Synthetic peptide
  MOD_RES (4)..(4): phosphorylated serine
APRSPPPSRP

SEQ ID NO: 181 - protein, 10 aa, Artificial Sequence
  Description of Artificial Sequence: Synthetic peptide
  MOD_RES (4)..(4): phosphorylated serine
APRSPPPSRV

SEQ ID NO: 182 - protein, 10 aa, Artificial Sequence
  Description of Artificial Sequence: Synthetic peptide
  MOD_RES (9)..(9): phosphorylated threonine
APSLFHLNTL

SEQ ID NO: 183 - protein, 11 aa, Artificial Sequence
  Description of Artificial Sequence: Synthetic peptide
  MOD_RES (8)..(8): phosphorylated serine
APSSARASPLL

SEQ ID NO: 184 - protein, 12 aa, Artificial Sequence
  Description of Artificial Sequence: Synthetic peptide
  MOD_RES (9)..(9): phosphorylated serine
APSTYAHLSPAK

SEQ ID NO: 185 - protein, 17 aa, Artificial Sequence
  Description of Artificial Sequence: Synthetic peptide
  MOD_RES (9)..(9): phosphorylated serine
APSTYAHLSPAKTPPPP

SEQ ID NO: 186 - protein, 9 aa, Artificial Sequence
  Description of Artificial Sequence: Synthetic peptide
  MOD_RES (6)..(6): phosphorylated serine
APSVRSLSL

SEQ ID NO: 187 - protein, 9 aa, Artificial Sequence
  Description of Artificial Sequence: Synthetic peptide
  MOD_RES (8)..(8): phosphorylated serine
APSVRSLSL

SEQ ID NO: 188 - protein, 11 aa, Artificial Sequence
  Description of Artificial Sequence: Synthetic peptide
  MOD_RES (4)..(4): phosphorylated serine
ARFSPDDKYSF

SEQ ID NO: 189 - protein, 11 aa, Artificial Sequence
  Description of Artificial Sequence: Synthetic peptide
  MOD_RES (4)..(4): phosphorylated serine
ARFSPDDKYSK

SEQ ID NO: 190 - protein, 11 aa, Artificial Sequence
  Description of Artificial Sequence: Synthetic peptide
  MOD_RES (4)..(4): phosphorylated serine
ARFSPDDKYSL

SEQ ID NO: 191 - protein, 11 aa, Artificial Sequence
  Description of Artificial Sequence: Synthetic peptide
  MOD_RES (4)..(4): phosphorylated serine
ARFSPDDKYSM

SEQ ID NO: 192 - protein, 11 aa, Artificial Sequence
  Description of Artificial Sequence: Synthetic peptide
  MOD_RES (4)..(4): phosphorylated serine
ARFSPDDKYSR

SEQ ID NO: 193 - protein, 11 aa, Artificial Sequence
  Description of Artificial Sequence: Synthetic peptide
  MOD_RES (4)..(4): phosphorylated serine
ARFSPDDKYSY

SEQ ID NO: 194 - protein, 11 aa, Artificial Sequence
  Description of Artificial Sequence: Synthetic peptide
  MOD_RES (7)..(7): phosphorylated threonine
ASDEIGTPRKF

SEQ ID NO: 195 - protein, 11 aa, Artificial Sequence
  Description of Artificial Sequence: Synthetic peptide
  MOD_RES (7)..(7): phosphorylated threonine
ASDEIGTPRKY

SEQ ID NO: 196 - protein, 11 aa, Artificial Sequence
  Description of Artificial Sequence: Synthetic peptide
  MOD_RES (7)..(7): phosphorylated threonine
ASEEIGTPRKF

SEQ ID NO: 197 - protein, 11 aa, Artificial Sequence
  Description of Artificial Sequence: Synthetic peptide
  MOD_RES (7)..(7): phosphorylated threonine
ASEEIGTPRKY

SEQ ID NO: 198 - protein, 15 aa, Artificial Sequence
  Description of Artificial Sequence: Synthetic peptide
  MOD_RES (2)..(2): phosphorylated serine
  MOD_RES (7)..(7): phosphorylated serine
ASISRLSGEQVDGKG

SEQ ID NO: 199 - protein, 15 aa, Artificial Sequence
  Description of Artificial Sequence: Synthetic peptide
  MOD_RES (2)..(2): phosphorylated serine
ASISRLSGEQVDGKG

SEQ ID NO: 200 - protein, 15 aa, Artificial Sequence
  Description of Artificial Sequence: Synthetic peptide
  MOD_RES (7)..(7): phosphorylated serine
ASISRLSGEQVDGKG

SEQ ID NO: 201 - protein, 16 aa, Artificial Sequence
  Description of Artificial Sequence: Synthetic peptide
  MOD_RES (2)..(2): phosphorylated serine
  MOD_RES (4)..(4): phosphorylated serine
ASISRLSGEQVDGKGQ

SEQ ID NO: 202 - protein, 16 aa, Artificial Sequence
  Description of Artificial Sequence: Synthetic peptide
  MOD_RES (2)..(2): phosphorylated serine
ASISRLSGEQVDKGKG

SEQ ID NO: 203 - protein, 13 aa, Artificial Sequence
  Description of Artificial Sequence: Synthetic peptide
  MOD_RES (5)..(5): phosphorylated serine
ASKASPTLDFTER

SEQ ID NO: 204 - protein, 27 aa, Artificial Sequence
  Description of Artificial Sequence: Synthetic peptide
  MOD_RES (22)..(22): phosphorylated serine
  MOD_RES (24)..(24): phosphorylated serine
ASKMTQPQSKSAFPLSRKNKGSGSLDG

SEQ ID NO: 205 - protein, 7 aa, Artificial Sequence
  Description of Artificial Sequence: Synthetic peptide
  MOD_RES (2)..(2): phosphorylated serine
ASLGFVF

SEQ ID NO: 206 - protein, 16 aa, Artificial Sequence
  Description of Artificial Sequence: Synthetic peptide
  MOD_RES (2)..(2): phosphorylated serine
ASPTIEAQGTSPAHDN

SEQ ID NO: 207 - protein, 17 aa, Artificial Sequence
  Description of Artificial Sequence: Synthetic peptide
  MOD_RES (2)..(2): phosphorylated serine
ASPTIEAQGTSPAHDNI

SEQ ID NO: 208 - protein, 18 aa, Artificial Sequence
  Description of Artificial Sequence: Synthetic peptide
  MOD_RES (2)..(2): phosphorylated serine
ASPTIEAQGTSPAHDNIA

SEQ ID NO: 209 - protein, 9 aa, Artificial Sequence
  Description of Artificial Sequence: Synthetic peptide
  MOD_RES (2)..(2): phosphorylated threonine
ATAGPRLGF

SEQ ID NO: 210 - protein, 9 aa, Artificial Sequence
  Description of Artificial Sequence: Synthetic peptide
  MOD_RES (2)..(2): phosphorylated threonine
ATAGPRLGW

SEQ ID NO: 211 - protein, 9 aa, Artificial Sequence
  Description of Artificial Sequence: Synthetic peptide
  MOD_RES (2)..(2): phosphorylated threonine
ATAGPRLGY

SEQ ID NO: 212 - protein, 11 aa, Artificial Sequence
  Description of Artificial Sequence: Synthetic peptide
  MOD_RES (7)..(7): phosphorylated threonine
ATDEIGTPRKF

SEQ ID NO: 213 - protein, 11 aa, Artificial Sequence
  Description of Artificial Sequence: Synthetic peptide
  MOD_RES (7)..(7): phosphorylated threonine
ATDEIGTPRKY

SEQ ID NO: 214 - protein, 11 aa, Artificial Sequence
  Description of Artificial Sequence: Synthetic peptide
  MOD_RES (7)..(7): phosphorylated threonine
ATEEIGTPRKF

SEQ ID NO: 215 - protein, 11 aa, Artificial Sequence
  Description of Artificial Sequence: Synthetic peptide
  MOD_RES (7)..(7): phosphorylated threonine
ATEEIGTPRKY

SEQ ID NO: 216 - protein, 10 aa, Artificial Sequence
  Description of Artificial Sequence: Synthetic peptide
  MOD_RES (4)..(4): phosphorylated serine
ATWSGSEFEV

SEQ ID NO: 217 - protein, 9 aa, Artificial Sequence
  Description of Artificial Sequence: Synthetic peptide
  MOD_RES (4)..(4): phosphorylated threonine
ATYTPQAPK

SEQ ID NO: 218 - protein, 10 aa, Artificial Sequence
  Description of Artificial Sequence: Synthetic peptide
  MOD_RES (4)..(4): phosphorylated threonine
ATYTPQAPKY

SEQ ID NO: 219 - protein, 9 aa, Artificial Sequence
  Description of Artificial Sequence: Synthetic peptide
  MOD_RES (6)..(6): phosphorylated serine
AVIHQSLGL

SEQ ID NO: 220 - protein, 9 aa, Artificial Sequence
  Description of Artificial Sequence: Synthetic peptide
  MOD_RES (6)..(6): phosphorylated serine
AVIHQSLGV

SEQ ID NO: 221 - protein, 9 aa, Artificial Sequence
  Description of Artificial Sequence: Synthetic peptide
  MOD_RES (8)..(8): phosphorylated serine
AVRPTRLSL

SEQ ID NO: 222 - protein, 11 aa, Artificial Sequence
  Description of Artificial Sequence: Synthetic peptide
  MOD_RES (4)..(4): phosphorylated serine
AVVSPPALHNA

SEQ ID NO: 223 - protein, 11 aa, Artificial Sequence
  Description of Artificial Sequence: Synthetic peptide
  MOD_RES (4)..(4): phosphorylated serine
AVVSPPALHNV

SEQ ID NO: 224 - protein, 12 aa, Artificial Sequence
  Description of Artificial Sequence: Synthetic peptide
  MOD_RES (6)..(6): phosphorylated serine
AYEKLSAEQSPP

SEQ ID NO: 225 - protein, 9 aa, Artificial Sequence
  Description of Artificial Sequence: Synthetic peptide
  MOD_RES (5)..(5): phosphorylated serine
DAKKSPLAL

SEQ ID NO: 226 - protein, 14 aa, Artificial Sequence
  Description of Artificial Sequence: Synthetic peptide
  MOD_RES (8)..(8): phosphorylated serine
DDDWTHLSSKEVDP

SEQ ID NO: 227 - protein, 15 aa, Artificial Sequence
  Description of Artificial Sequence: Synthetic peptide
  MOD_RES (8)..(8): phosphorylated serine
DDDWTHLSSKEVDPS

SEQ ID NO: 228 - protein, 16 aa, Artificial Sequence
  Description of Artificial Sequence: Synthetic peptide
  MOD_RES (8)..(8): phosphorylated serine
DDDWTHLSSKEVDPST

SEQ ID NO: 229 - protein, 17 aa, Artificial Sequence
  Description of Artificial Sequence: Synthetic peptide
  MOD_RES (8)..(8): phosphorylated serine
DDDWTHLSSKEVDPSTG

SEQ ID NO: 230 - protein, 14 aa, Artificial Sequence
  Description of Artificial Sequence: Synthetic peptide
  MOD_RES (7)..(7): phosphorylated serine
DDWTHLSSKEVDPS

SEQ ID NO: 231 - protein, 9 aa, Artificial Sequence
  Description of Artificial Sequence: Synthetic peptide
  MOD_RES (8)..(8): phosphorylated threonine
DEFERIKTF

SEQ ID NO: 232 - protein, 9 aa, Artificial Sequence
  Description of Artificial Sequence: Synthetic peptide
  MOD_RES (8)..(8): phosphorylated threonine
DEFERIKTW

SEQ ID NO: 233 - protein, 9 aa, Artificial Sequence
  Description of Artificial Sequence: Synthetic peptide
  MOD_RES (8)..(8): phosphorylated threonine
DEFERIKTY

SEQ ID NO: 234 - protein, 9 aa, Artificial Sequence
  Description of Artificial Sequence: Synthetic peptide
  MOD_RES (8)..(8): phosphorylated serine
DEISHRASF

SEQ ID NO: 235 - protein, 9 aa, Artificial Sequence
  Description of Artificial Sequence: Synthetic peptide
  MOD_RES (8)..(8): phosphorylated serine
DEISHRASW

SEQ ID NO: 236 - protein, 9 aa, Artificial Sequence
  Description of Artificial Sequence: Synthetic peptide
  MOD_RES (8)..(8): phosphorylated serine
DEISHRASY

SEQ ID NO: 237 - protein, 9 aa, Artificial Sequence
  Description of Artificial Sequence: Synthetic peptide
  MOD_RES (8)..(8): phosphorylated serine
DERLRINSF

SEQ ID NO: 238 - protein, 9 aa, Artificial Sequence
  Description of Artificial Sequence: Synthetic peptide
  MOD_RES (8)..(8): phosphorylated serine
DERLRINSL

SEQ ID NO: 239 - protein, 9 aa, Artificial Sequence
  Description of Artificial Sequence: Synthetic peptide
  MOD_RES (8)..(8): phosphorylated serine
DERLRINSW

SEQ ID NO: 240 - protein, 9 aa, Artificial Sequence
  Description of Artificial Sequence: Synthetic peptide
  MOD_RES (8)..(8): phosphorylated serine
DERLRINSY

SEQ ID NO: 241 - protein, 15 aa, Artificial Sequence
  Description of Artificial Sequence: Synthetic peptide
  MOD_RES (4)..(4): phosphorylated serine
DKLSVIAEDSESGKQ

SEQ ID NO: 242 - protein, 16 aa, Artificial Sequence
  Description of Artificial Sequence: Synthetic peptide
  MOD_RES (4)..(4): phosphorylated serine
DKLSVIAEDSESGKQN

SEQ ID NO: 243 - protein, 17 aa, Artificial Sequence
  Description of Artificial Sequence: Synthetic peptide
  MOD_RES (4)..(4): phosphorylated serine
DKLSVIAEDSESGKQNP

SEQ ID NO: 244 - protein, 18 aa, Artificial Sequence
  Description of Artificial Sequence: Synthetic peptide
  MOD_RES (4)..(4): phosphorylated serine
DKLSVIAEDSESGKQNPG

SEQ ID NO: 245 - protein, 20 aa, Artificial Sequence
  Description of Artificial Sequence: Synthetic peptide
  MOD_RES (4)..(4): phosphorylated serine
DKLSVIAEDSESGKQNPGDS

SEQ ID NO: 246 - protein, 9 aa, Artificial Sequence
  Description of Artificial Sequence: Synthetic peptide
  MOD_RES (6)..(6): phosphorylated serine
  MOD_RES (7)..(7): oxidized methionine
DLKRRSMSI

SEQ ID NO: 247 - protein, 9 aa, Artificial Sequence
  Description of Artificial Sequence: Synthetic peptide
  MOD_RES (6)..(6): phosphorylated serine
DLKRRSMSI

SEQ ID NO: 248 - protein, 9 aa, Artificial Sequence
  Description of Artificial Sequence: Synthetic peptide
  MOD_RES (8)..(8): phosphorylated serine
DLKSSKASL

SEQ ID NO: 249 - protein, 9 aa, Artificial Sequence
  Description of Artificial Sequence: Synthetic peptide
  MOD_RES (4)..(4): phosphorylated threonine
DLRTVEKEL

SEQ ID NO: 250 - protein, 8 aa, Artificial Sequence
  Description of Artificial Sequence: Synthetic peptide
  MOD_RES (3)..(3): phosphorylated serine
DLSEEKFL

SEQ ID NO: 251 - protein, 8 aa, Artificial Sequence
  Description of Artificial Sequence: Synthetic peptide
  MOD_RES (3)..(3): phosphorylated serine
DLSEEKFV

SEQ ID NO: 252 - protein, 10 aa, Artificial Sequence
  Description of Artificial Sequence: Synthetic peptide
  MOD_RES (6)..(6): phosphorylated serine
DLVPLSPLKK

SEQ ID NO: 253 - protein, 10 aa, Artificial Sequence
  Description of Artificial Sequence: Synthetic peptide
  MOD_RES (6)..(6): phosphorylated threonine
DLWKITKVMD

SEQ ID NO: 254 - protein, 10 aa, Artificial Sequence
  Description of Artificial Sequence: Synthetic peptide
  MOD_RES (6)..(6): phosphorylated serine
DMVPLSPLKK

SEQ ID NO: 255 - protein, 18 aa, Artificial Sequence
  Description of Artificial Sequence: Synthetic peptide
  MOD_RES (10)..(10): phosphorylated threonine
DPTRRFFKVTPPPGSGPQ

SEQ ID NO: 256 - protein, 9 aa, Artificial Sequence
  Description of Artificial Sequence: Synthetic peptide
  MOD_RES (8)..(8): phosphorylated threonine
DQFERIKTL

SEQ ID NO: 257 - protein, 9 aa, Artificial Sequence
  Description of Artificial Sequence: Synthetic peptide
  MOD_RES (8)..(8): phosphorylated serine
DQISHRASL

SEQ ID NO: 258 - protein, 10 aa, Artificial Sequence
  Description of Artificial Sequence: Synthetic peptide
  MOD_RES (6)..(6): phosphorylated serine
DSDPLSPLKY

SEQ ID NO: 259 - protein, 10 aa, Artificial Sequence
  Description of Artificial Sequence: Synthetic peptide
  MOD_RES (6)..(6): phosphorylated serine
DSEPLSPLKY

SEQ ID NO: 260 - protein, 8 aa, Artificial Sequence
  Description of Artificial Sequence: Synthetic peptide
  MOD_RES (3)..(3): phosphorylated serine
DSSEEKFL

SEQ ID NO: 261 - protein, 8 aa, Artificial Sequence
  Description of Artificial Sequence: Synthetic peptide
  MOD_RES (3)..(3): phosphorylated serine
DSSEEKFV

SEQ ID NO: 262 - protein, 10 aa, Artificial Sequence
  Description of Artificial Sequence: Synthetic peptide
  MOD_RES (6)..(6): phosphorylated serine
DSVPLSPLKY

SEQ ID NO: 263 - protein, 10 aa, Artificial Sequence
  Description of Artificial Sequence: Synthetic peptide
  MOD_RES (6)..(6): phosphorylated serine
DTDPLSPLKY

SEQ ID NO: 264 - protein, 10 aa, Artificial Sequence
  Description of Artificial Sequence: Synthetic peptide
  MOD_RES (6)..(6): phosphorylated serine
DTEPLSPLKY

SEQ ID NO: 265 - protein, 10 aa, Artificial Sequence
  Description of Artificial Sequence: Synthetic peptide
  MOD_RES (6)..(6): phosphorylated serine
DTVPLSPLKY

SEQ ID NO: 266 - protein, 13 aa, Artificial Sequence
  Description of Artificial Sequence: Synthetic peptide
  MOD_RES (6)..(6): phosphorylated serine
DWTHLSSKEVDPS

SEQ ID NO: 267 - protein, 15 aa, Artificial Sequence
  Description of Artificial Sequence: Synthetic peptide
  MOD_RES (6)..(6): phosphorylated serine
DWTHLSSKEVDPSTG

SEQ ID NO: 268 - protein, 19 aa, Artificial Sequence
  Description of Artificial Sequence: Synthetic peptide
  MOD_RES (4)..(4): phosphorylated serine
EEGSPTMVEKGLEPGVFTL

SEQ ID NO: 269 - protein, 9 aa, Artificial Sequence
  Description of Artificial Sequence: Synthetic peptide
  MOD_RES (4)..(4): phosphorylated serine
EELSPTAKF

SEQ ID NO: 270 - protein, 9 aa, Artificial Sequence
  Description of Artificial Sequence: Synthetic peptide
  MOD_RES (4)..(4): phosphorylated serine
EELSPTKAF

SEQ ID NO: 271 - protein, 24 aa, Artificial Sequence
  Description of Artificial Sequence: Synthetic peptide
  MOD_RES (10)..(10): phosphorylated serine
EEMPENALPSDEDDKDPNDPYRAL

SEQ ID NO: 272 - protein, 9 aa, Artificial Sequence
  Description of Artificial Sequence: Synthetic peptide
  MOD_RES (5)..(5): phosphorylated serine
EERRSPPAP

SEQ ID NO: 273 - protein, 10 aa, Artificial Sequence
  Description of Artificial Sequence: Synthetic peptide
  MOD_RES (3)..(3): phosphorylated serine
EESSDDGKKF

SEQ ID NO: 274 - protein, 10 aa, Artificial Sequence
  Description of Artificial Sequence: Synthetic peptide
  MOD_RES (4)..(4): phosphorylated serine
EESSDDGKKF

SEQ ID NO: 275 - protein, 10 aa, Artificial Sequence
  Description of Artificial Sequence: Synthetic peptide
  MOD_RES (3)..(3): phosphorylated serine
EESSDDGKKW

SEQ ID NO: 276 - protein, 10 aa, Artificial Sequence
  Description of Artificial Sequence: Synthetic peptide
  MOD_RES (4)..(4): phosphorylated serine
EESSDDGKKW

SEQ ID NO: 277 - protein, 10 aa, Artificial Sequence
  Description of Artificial Sequence: Synthetic peptide
  MOD_RES (3)..(3): phosphorylated serine
EESSDDGKKY

SEQ ID NO: 278 - protein, 10 aa, Artificial Sequence
  Description of Artificial Sequence: Synthetic peptide
  MOD_RES (4)..(4): phosphorylated serine
EESSDDGKKY

SEQ ID NO: 279 - protein, 23 aa, Artificial Sequence
  Description of Artificial Sequence: Synthetic peptide
  MOD_RES (9)..(9): phosphorylated serine
EGEEPTVYSDEEEPKDESARKND

SEQ ID NO: 280 - protein, 18 aa, Artificial Sequence
  Description of Artificial Sequence: Synthetic peptide
  MOD_RES (3)..(3): phosphorylated serine
EGSPTMVEKGLEPGVFTL

SEQ ID NO: 281 - protein, 9 aa, Artificial Sequence
  Description of Artificial Sequence: Synthetic peptide
  MOD_RES (5)..(5): phosphorylated serine
ELFSSPPAV

SEQ ID NO: 282 - protein, 10 aa, Artificial Sequence
  Description of Artificial Sequence: Synthetic peptide
  MOD_RES (5)..(5): phosphorylated serine
ELKKSPTSLK

SEQ ID NO: 283 - protein, 10 aa, Artificial Sequence
  Description of Artificial Sequence: Synthetic peptide
  MOD_RES (5)..(5): phosphorylated serine
ELKKSPTSLY

SEQ ID NO: 284 - protein, 12 aa, Artificial Sequence
  Description of Artificial Sequence: Synthetic peptide
  MOD_RES (9)..(9): phosphorylated serine
ELLMPHRISSHF

SEQ ID NO: 285 - protein, 13 aa, Artificial Sequence
  Description of Artificial Sequence: Synthetic peptide
  MOD_RES (9)..(9): phosphorylated serine
ELLMPHRISSHFL

SEQ ID NO: 286 - protein, 10 aa, Artificial Sequence
  Description of Artificial Sequence: Synthetic peptide
  MOD_RES (7)..(7): phosphorylated serine
ELRISGSVQL

SEQ ID NO: 287 - protein, 10 aa, Artificial Sequence
  Description of Artificial Sequence: Synthetic peptide
  MOD_RES (5)..(5): phosphorylated serine
EMKKSPTSLK

SEQ ID NO: 288 - protein, 21 aa, Artificial Sequence
  Description of Artificial Sequence: Synthetic peptide
  MOD_RES (4)..(4): phosphorylated serine
  MOD_RES (8)..(8): phosphorylated serine
  MOD_RES (13)..(13): phosphorylated serine
EPASPAASISRLSGEQVDGKG

SEQ ID NO: 289 - protein, 21 aa, Artificial Sequence
  Description of Artificial Sequence: Synthetic peptide
  MOD_RES (4)..(4): phosphorylated serine
  MOD_RES (8)..(8): phosphorylated serine
EPASPAASISRLSGEQVDGKG

SEQ ID NO: 290 - protein, 9 aa, Artificial Sequence
  Description of Artificial Sequence: Synthetic peptide
  MOD_RES (6)..(6): phosphorylated serine
EPKRRSARF

SEQ ID NO: 291 - protein, 9 aa, Artificial Sequence
  Description of Artificial Sequence: Synthetic peptide
  MOD_RES (6)..(6): phosphorylated serine
EPKRRSARL

SEQ ID NO: 292 - protein, 9 aa, Artificial Sequence
  Description of Artificial Sequence: Synthetic peptide
  MOD_RES (6)..(6): phosphorylated serine
EPKRRSARM

SEQ ID NO: 293 - protein, 9 aa, Artificial Sequence
  Description of Artificial Sequence: Synthetic peptide
  MOD_RES (6)..(6): phosphorylated serine
EPKRRSARV

SEQ ID NO: 294 - protein, 9 aa, Artificial Sequence
  Description of Artificial Sequence: Synthetic peptide
  MOD_RES (4)..(4): phosphorylated serine
EPRSPSHSF

SEQ ID NO: 295 - protein, 9 aa, Artificial Sequence
  Description of Artificial Sequence: Synthetic peptide
  MOD_RES (4)..(4): phosphorylated serine
EPRSPSHSL

SEQ ID NO: 296 - protein, 9 aa, Artificial Sequence
  Description of Artificial Sequence: Synthetic peptide
  MOD_RES (4)..(4): phosphorylated serine
EPRSPSHSM

SEQ ID NO: 297 - protein, 9 aa, Artificial Sequence
  Description of Artificial Sequence: Synthetic peptide
  MOD_RES (4)..(4): phosphorylated serine
EPRSPSHSV

SEQ ID NO: 298 - protein, 15 aa, Artificial Sequence
  Description of Artificial Sequence: Synthetic peptide
  MOD_RES (3)..(3): phosphorylated serine
ERSPLLSQETAGQKP

SEQ ID NO: 299 - protein, 16 aa, Artificial Sequence
  Description of Artificial Sequence: Synthetic peptide
  MOD_RES (3)..(3): phosphorylated serine
ERSPLLSQETAGQKPL

SEQ ID NO: 300 - protein, 8 aa, Artificial Sequence
  Description of Artificial Sequence: Synthetic peptide
  MOD_RES (4)..(4): phosphorylated serine
ESDSLPRY

SEQ ID NO: 301 - protein, 8 aa, Artificial Sequence
  Description of Artificial Sequence: Synthetic peptide
  MOD_RES (4)..(4): phosphorylated serine
ESESLPRY

SEQ ID NO: 302 - protein, 13 aa, Artificial Sequence
  Description of Artificial Sequence: Synthetic peptide
  MOD_RES (3)..(3): phosphorylated serine
ESSVRSQEDQLSR

SEQ ID NO: 303 - protein, 14 aa, Artificial Sequence
  Description of Artificial Sequence: Synthetic peptide
  MOD_RES (3)..(3): phosphorylated serine
ESSVRSQEDQLSRR

SEQ ID NO: 304 - protein, 8 aa, Artificial Sequence
  Description of Artificial Sequence: Synthetic peptide
  MOD_RES (4)..(4): phosphorylated serine
ETDSLPRY

SEQ ID NO: 305 - protein, 8 aa, Artificial Sequence
  Description of Artificial Sequence: Synthetic peptide
  MOD_RES (4)..(4): phosphorylated serine
ETESLPRY

SEQ ID NO: 306 - protein, 13 aa, Artificial Sequence
  Description of Artificial Sequence: Synthetic peptide
  MOD_RES (9)..(9): phosphorylated serine
FDKHTLGDSDNES

SEQ ID NO: 307 - protein, 10 aa, Artificial Sequence
  Description of Artificial Sequence: Synthetic peptide
  MOD_RES (6)..(6): phosphorylated serine
FEDDDSNEKL

SEQ ID NO: 308 - protein, 8 aa, Artificial Sequence
  Description of Artificial Sequence: Synthetic peptide
  MOD_RES (4)..(4): phosphorylated serine
FIESPSKL

SEQ ID NO: 309 - protein, 8 aa, Artificial Sequence
  Description of Artificial Sequence: Synthetic peptide
  MOD_RES (4)..(4): phosphorylated serine
FIESPSKY

SEQ ID NO: 310 - protein, 11 aa, Artificial Sequence
  Description of Artificial Sequence: Synthetic peptide
  MOD_RES (4)..(4): phosphorylated serine
FIGSPTTPAGL

SEQ ID NO: 311 - protein, 12 aa, Artificial Sequence
  Description of Artificial Sequence: Synthetic peptide
  MOD_RES (8)..(8): phosphorylated serine
FKMPQEKSPGYS

SEQ ID NO: 312 - protein, 9 aa, Artificial Sequence
  Description of Artificial Sequence: Synthetic peptide
  MOD_RES (3)..(3): phosphorylated serine
FKSPVKTIR

SEQ ID NO: 313 - protein, 8 aa, Artificial Sequence
  Description of Artificial Sequence: Synthetic peptide
  MOD_RES (3)..(3): phosphorylated threonine
FKTQPVTF

SEQ ID NO: 314 - protein, 9 aa, Artificial Sequence
  Description of Artificial Sequence: Synthetic peptide
  MOD_RES (5)..(5): phosphorylated serine
FLDNSFEKV

SEQ ID NO: 315 - protein, 11 aa, Artificial Sequence
  Description of Artificial Sequence: Synthetic peptide
  MOD_RES (7)..(7): phosphorylated threonine
FLDRPPTPLFI

SEQ ID NO: 316 - protein, 9 aa, Artificial Sequence
  Description of Artificial Sequence: Synthetic peptide
  MOD_RES (4)..(4): phosphorylated serine
FLDSLRDLI

SEQ ID NO: 317 - protein, 9 aa, Artificial Sequence
  Description of Artificial Sequence: Synthetic peptide
  MOD_RES (4)..(4): phosphorylated threonine
FLDTPIAKV

SEQ ID NO: 318 - protein, 12 aa, Artificial Sequence
  Description of Artificial Sequence: Synthetic peptide
  MOD_RES (8)..(8): phosphorylated serine
FLFDKPVSPLLL

SEQ ID NO: 319 - protein, 9 aa, Artificial Sequence
  Description of Artificial Sequence: Synthetic peptide
  MOD_RES (8)..(8): phosphorylated serine
FLGVRPKSA

SEQ ID NO: 320 - protein, 10 aa, Artificial Sequence
  Description of Artificial Sequence: Synthetic peptide
  MOD_RES (6)..(6): phosphorylated threonine
FLIIRTVLQL

SEQ ID NO: 321 - protein, 14 aa, Artificial Sequence
  Description of Artificial Sequence: Synthetic peptide
  MOD_RES (10)..(10): phosphorylated serine
FLITGGGKGSGFSL

SEQ ID NO: 322 - protein, 10 aa, Artificial Sequence
  Description of Artificial Sequence: Synthetic peptide
  MOD_RES (4)..(4): phosphorylated serine
FLLSQNFDDE

SEQ ID NO: 323 - protein, 9 aa, Artificial Sequence
  Description of Artificial Sequence: Synthetic peptide
  MOD_RES (4)..(4): phosphorylated serine
FLYSGKETK

SEQ ID NO: 324 - protein, 9 aa, Artificial Sequence
  Description of Artificial Sequence: Synthetic peptide
  MOD_RES (4)..(4): phosphorylated serine
FLYSGKETY

SEQ ID NO: 325 - protein, 9 aa, Artificial Sequence
  Description of Artificial Sequence: Synthetic peptide
  MOD_RES (4)..(4): phosphorylated serine
FPHSLLSVF

SEQ ID NO: 326 - protein, 9 aa, Artificial Sequence
  Description of Artificial Sequence: Synthetic peptide
  MOD_RES (4)..(4): phosphorylated serine
FPHSLLSVI

SEQ ID NO: 327 - protein, 9 aa, Artificial Sequence
  Description of Artificial Sequence: Synthetic peptide
  MOD_RES (4)..(4): phosphorylated serine
FPHSLLSVL

SEQ ID NO: 328 - protein, 9 aa, Artificial Sequence
  Description of Artificial Sequence: Synthetic peptide
  MOD_RES (4)..(4): phosphorylated serine
FPHSLLSVM

SEQ ID NO: 329 - protein, 9 aa, Artificial Sequence
  Description of Artificial Sequence: Synthetic peptide
  MOD_RES (4)..(4): phosphorylated serine
FPHSLLSVV

SEQ ID NO: 330 - protein, 8 aa, Artificial Sequence
  Description of Artificial Sequence: Synthetic peptide
  MOD_RES (4)..(4): phosphorylated serine
FPISPVRF

SEQ ID NO: 331 - protein, 8 aa, Artificial Sequence
  Description of Artificial Sequence: Synthetic peptide
  MOD_RES (4)..(4): phosphorylated serine
FPISPVRL

SEQ ID NO: 332 - protein, 8 aa, Artificial Sequence
  Description of Artificial Sequence: Synthetic peptide
  MOD_RES (4)..(4): phosphorylated serine
FPISPVRM

SEQ ID NO: 333 - protein, 8 aa, Artificial Sequence
  Description of Artificial Sequence: Synthetic peptide
  MOD_RES (4)..(4): phosphorylated serine
FPISPVRV

SEQ ID NO: 334 - protein, 11 aa, Artificial Sequence
  Description of Artificial Sequence: Synthetic peptide
  MOD_RES (5)..(5): phosphorylated serine
FPLDSPKTLVL

SEQ ID NO: 335 - protein, 9 aa, Artificial Sequence
  Description of Artificial Sequence: Synthetic peptide
  MOD_RES (6)..(6): phosphorylated serine
FPRRHSVTL

SEQ ID NO: 336 - protein, 10 aa, Artificial Sequence
  Description of Artificial Sequence: Synthetic peptide
  MOD_RES (4)..(4): phosphorylated serine
FPRSPTKSSF

SEQ ID NO: 337 - protein, 10 aa, Artificial Sequence
  Description of Artificial Sequence: Synthetic peptide
  MOD_RES (4)..(4): phosphorylated serine
FPRSPTKSSL

SEQ ID NO: 338 - protein, 12 aa, Artificial Sequence
  Description of Artificial Sequence: Synthetic peptide
  MOD_RES (4)..(4): phosphorylated serine
FPRSPTKSSLDF

SEQ ID NO: 339 - protein, 12 aa, Artificial Sequence
  Description of Artificial Sequence: Synthetic peptide
  MOD_RES (4)..(4): phosphorylated serine
FPRSPTKSSLDL

SEQ ID NO: 340 - protein, 12 aa, Artificial Sequence
  Description of Artificial Sequence: Synthetic peptide
  MOD_RES (4)..(4): phosphorylated serine
FPRSPTKSSLDM

SEQ ID NO: 341 - protein, 12 aa, Artificial Sequence
  Description of Artificial Sequence: Synthetic peptide
  MOD_RES (4)..(4): phosphorylated serine
FPRSPTKSSLDV

SEQ ID NO: 342 - protein, 10 aa, Artificial Sequence
  Description of Artificial Sequence: Synthetic peptide
  MOD_RES (4)..(4): phosphorylated serine
FPRSPTKSSM

SEQ ID NO: 343 - protein, 10 aa, Artificial Sequence
  Description of Artificial Sequence: Synthetic peptide
  MOD_RES (4)..(4): phosphorylated serine
FPRSPTKSSV

SEQ ID NO: 344 - protein, 9 aa, Artificial Sequence
  Description of Artificial Sequence: Synthetic peptide
  MOD_RES (4)..(4): phosphorylated serine
FRFSGRTEY

SEQ ID NO: 345 - protein, 9 aa, Artificial Sequence
  Description of Artificial Sequence: Synthetic peptide
  MOD_RES (7)..(7): phosphorylated serine
FRGRYRSPY

SEQ ID NO: 346 - protein, 9 aa, Artificial Sequence
  Description of Artificial Sequence: Synthetic peptide
  MOD_RES (4)..(4): phosphorylated serine
FRKSMVEHY

SEQ ID NO: 347 - protein, 12 aa, Artificial Sequence
  Description of Artificial Sequence: Synthetic peptide
  MOD_RES (4)..(4): phosphorylated serine
FRRSPIKSSLDY

SEQ ID NO: 348 - protein, 10 aa, Artificial Sequence
  Description of Artificial Sequence: Synthetic peptide
  MOD_RES (4)..(4): phosphorylated serine
FRRSPTKSSF

SEQ ID NO: 349 - protein, 10 aa, Artificial Sequence
  Description of Artificial Sequence: Synthetic peptide
  MOD_RES (4)..(4): phosphorylated serine
FRRSPTKSSL

SEQ ID NO: 350 - protein, 11 aa, Artificial Sequence
  Description of Artificial Sequence: Synthetic peptide
  MOD_RES (4)..(4): phosphorylated serine
FRRSPTKSSLD

SEQ ID NO: 351 - protein, 12 aa, Artificial Sequence
  Description of Artificial Sequence: Synthetic peptide
  MOD_RES (4)..(4): phosphorylated serine
FRRSPTKSSLDF

SEQ ID NO: 352 - protein, 12 aa, Artificial Sequence
  Description of Artificial Sequence: Synthetic peptide
  MOD_RES (4)..(4): phosphorylated serine
FRRSPTKSSLDL

SEQ ID NO: 353 - protein, 12 aa, Artificial Sequence
  Description of Artificial Sequence: Synthetic peptide
  MOD_RES (4)..(4): phosphorylated serine
FRRSPTKSSLDM

SEQ ID NO: 354 - protein, 12 aa, Artificial Sequence
  Description of Artificial Sequence: Synthetic peptide
  MOD_RES (4)..(4): phosphorylated serine
FRRSPTKSSLDV

SEQ ID NO: 355 - protein, 12 aa, Artificial Sequence
  Description of Artificial Sequence: Synthetic peptide
  MOD_RES (4)..(4): phosphorylated serine
FRRSPTKSSLDY

SEQ ID NO: 356 - protein, 10 aa, Artificial Sequence
  Description of Artificial Sequence: Synthetic peptide
  MOD_RES (4)..(4): phosphorylated serine
FRRSPTKSSM

SEQ ID NO: 357 - protein, 10 aa, Artificial Sequence
  Description of Artificial Sequence: Synthetic peptide
  MOD_RES (4)..(4): phosphorylated serine
FRRSPTKSSV

SEQ ID NO: 358 - protein, 11 aa, Artificial Sequence
  Description of Artificial Sequence: Synthetic peptide
  MOD_RES (3)..(3): phosphorylated serine
FRSPTKSSLDF

SEQ ID NO: 359 - protein, 11 aa, Artificial Sequence
  Description of Artificial Sequence: Synthetic peptide
  MOD_RES (3)..(3): phosphorylated serine
FRSPTKSSLDL

SEQ ID NO: 360 - protein, 11 aa, Artificial Sequence
  Description of Artificial Sequence: Synthetic peptide
  MOD_RES (3)..(3): phosphorylated serine
FRSPTKSSLDM

SEQ ID NO: 361 - protein, 11 aa, Artificial Sequence
  Description of Artificial Sequence: Synthetic peptide
  MOD_RES (3)..(3): phosphorylated serine
FRSPTKSSLDV

SEQ ID NO: 362 - protein, 9 aa, Artificial Sequence
  Description of Artificial Sequence: Synthetic peptide
  MOD_RES (4)..(4): phosphorylated serine
FRYSGKTEF

SEQ ID NO: 363 - protein, 9 aa, Artificial Sequence
  Description of Artificial Sequence: Synthetic peptide
  MOD_RES (4)..(4): phosphorylated serine
FRYSGKTEK

SEQ ID NO: 364 - protein, 9 aa, Artificial Sequence
  Description of Artificial Sequence: Synthetic peptide
  MOD_RES (4)..(4): phosphorylated serine
FRYSGKTEL

SEQ ID NO: 365 - protein, 9 aa, Artificial Sequence
  Description of Artificial Sequence: Synthetic peptide
  MOD_RES (4)..(4): phosphorylated serine
FRYSGKTEM

SEQ ID NO: 366 - protein, 9 aa, Artificial Sequence
  Description of Artificial Sequence: Synthetic peptide
  MOD_RES (4)..(4): phosphorylated serine
FRYSGKTER

SEQ ID NO: 367 - protein, 9 aa, Artificial Sequence
  Description of Artificial Sequence: Synthetic peptide
  MOD_RES (4)..(4): phosphorylated serine
FRYSGKTEY

SEQ ID NO: 368 - protein, 10 aa, Artificial Sequence
  Description of Artificial Sequence: Synthetic peptide
  MOD_RES (4)..(4): phosphorylated serine
FSDSHEGFSY

SEQ ID NO: 369 - protein, 10 aa, Artificial Sequence
  Description of Artificial Sequence: Synthetic peptide
  MOD_RES (4)..(4): phosphorylated serine
FSESHEGFSY

SEQ ID NO: 370 - protein, 8 aa, Artificial Sequence
  Description of Artificial Sequence: Synthetic peptide
  MOD_RES (4)..(4): phosphorylated serine
FSESPSKL

SEQ ID NO: 371 - protein, 8 aa, Artificial Sequence
  Description of Artificial Sequence: Synthetic peptide
  MOD_RES (4)..(4): phosphorylated serine
FSESPSKY

SEQ ID NO: 372 - protein, 8 aa, Artificial Sequence
  Description of Artificial Sequence: Synthetic peptide
  MOD_RES (4)..(4): phosphorylated serine
FSISPVRF

SEQ ID NO: 373 - protein, 8 aa, Artificial Sequence
  Description of Artificial Sequence: Synthetic peptide
  MOD_RES (4)..(4): phosphorylated serine
FSISPVRL

SEQ ID NO: 374 - protein, 8 aa, Artificial Sequence
  Description of Artificial Sequence: Synthetic peptide
  MOD_RES (4)..(4): phosphorylated serine
FSISPVRM

SEQ ID NO: 375 - protein, 8 aa, Artificial Sequence
  Description of Artificial Sequence: Synthetic peptide
  MOD_RES (4)..(4): phosphorylated serine
FSISPVRV

SEQ ID NO: 376 - protein, 10 aa, Artificial Sequence
  Description of Artificial Sequence: Synthetic peptide
  MOD_RES (3)..(3): phosphorylated serine
FSSSHEGFSY

SEQ ID NO: 377 - protein, 10 aa, Artificial Sequence
  Description of Artificial Sequence: Synthetic peptide
  MOD_RES (4)..(4): phosphorylated serine
FSSSHEGFSY

SEQ ID NO: 378 - protein, 10 aa, Artificial Sequence
  Description of Artificial Sequence: Synthetic peptide
  MOD_RES (4)..(4): phosphorylated serine
FTDSHEGFSY

SEQ ID NO: 379 - protein, 10 aa, Artificial Sequence
  Description of Artificial Sequence: Synthetic peptide
  MOD_RES (4)..(4): phosphorylated serine
FTESHEGFSY

SEQ ID NO: 380 - protein, 8 aa, Artificial Sequence
  Description of Artificial Sequence: Synthetic peptide
  MOD_RES (4)..(4): phosphorylated serine
FTESPSKL

SEQ ID NO: 381 - protein, 8 aa, Artificial Sequence
  Description of Artificial Sequence: Synthetic peptide
  MOD_RES (4)..(4): phosphorylated serine
FTESPSKY

SEQ ID NO: 382 - protein, 9 aa, Artificial Sequence
  Description of Artificial Sequence: Synthetic peptide
  MOD_RES (4)..(4): phosphorylated serine
FTKSPYQEF

SEQ ID NO: 383 - protein, 10 aa, Artificial Sequence
  Description of Artificial Sequence: Synthetic peptide
  MOD_RES (3)..(3): phosphorylated serine
FTSSHEGFSY

SEQ ID NO: 384 - protein, 13 aa, Artificial Sequence
  Description of Artificial Sequence: Synthetic peptide
  MOD_RES (9)..(9): phosphorylated serine
FVSKVMIGSPKKV

SEQ ID NO: 385 - protein, 11 aa, Artificial Sequence
  Description of Artificial Sequence: Synthetic peptide
  MOD_RES (4)..(4): phosphorylated serine
GALSPSLLHSL

SEQ ID NO: 386 - protein, 9 aa, Artificial Sequence
  Description of Artificial Sequence: Synthetic peptide
  MOD_RES (8)..(8): phosphorylated serine
GAQPGRHSF

SEQ ID NO: 387 - protein, 9 aa, Artificial Sequence
  Description of Artificial Sequence: Synthetic peptide
  MOD_RES (8)..(8): phosphorylated serine
GAQPGRHSL

SEQ ID NO: 388 - protein, 9 aa, Artificial Sequence
  Description of Artificial Sequence: Synthetic peptide
  MOD_RES (8)..(8): phosphorylated serine
GAQPGRHSV

SEQ ID NO: 389 - protein, 14 aa, Artificial Sequence
  Description of Artificial Sequence: Synthetic peptide
  MOD_RES (9)..(9): phosphorylated serine
GDDDWTHLSSKEVD

SEQ ID NO: 390 - protein, 15 aa, Artificial Sequence
  Description of Artificial Sequence: Synthetic peptide
  MOD_RES (9)..(9): phosphorylated serine
GDDDWTHLSSKEVDP

SEQ ID NO: 391 - protein, 16 aa, Artificial Sequence
  Description of Artificial Sequence: Synthetic peptide
  MOD_RES (9)..(9): phosphorylated serine
GDDDWTHLSSKEVDPS

SEQ ID NO: 392 - protein, 17 aa, Artificial Sequence
  Description of Artificial Sequence: Synthetic peptide
  MOD_RES (9)..(9): phosphorylated serine
GDDDWTHLSSKEVDPST

SEQ ID NO: 393 - protein, 18 aa, Artificial Sequence
  Description of Artificial Sequence: Synthetic peptide
  MOD_RES (9)..(9): phosphorylated serine
GDDDWTHLSSKEVDPSTG

SEQ ID NO: 394 - protein, 9 aa, Artificial Sequence
  Description of Artificial Sequence: Synthetic peptide
  MOD_RES (4)..(4): phosphorylated serine
GEASPSHII

SEQ ID NO: 395 - protein, 11 aa, Artificial Sequence
  Description of Artificial Sequence: Synthetic peptide
  MOD_RES (4)..(4): phosphorylated serine
GEESSDDGKKF

SEQ ID NO: 396 - protein, 11 aa, Artificial Sequence
  Description of Artificial Sequence: Synthetic peptide
  MOD_RES (4)..(4): phosphorylated serine
GEESSDDGKKW

SEQ ID NO: 397 - protein, 11 aa, Artificial Sequence
  Description of Artificial Sequence: Synthetic peptide
  MOD_RES (4)..(4): phosphorylated serine
GEESSDDGKKY

SEQ ID NO: 398 - protein, 12 aa, Artificial Sequence
  Description of Artificial Sequence: Synthetic peptide
  MOD_RES (4)..(4): phosphorylated serine
GEESSDIDGKKF

SEQ ID NO: 399 - protein, 9 aa, Artificial Sequence
  Description of Artificial Sequence: Synthetic peptide
  MOD_RES (4)..(4): phosphorylated serine
GEISPQREV

SEQ ID NO: 400 - protein, 16 aa, Artificial Sequence
  Description of Artificial Sequence: Synthetic peptide
  MOD_RES (4)..(4): phosphorylated serine
GERSPLLSQETAGQKP

SEQ ID NO: 401 - protein, 17 aa, Artificial Sequence
  Description of Artificial Sequence: Synthetic peptide
  MOD_RES (4)..(4): phosphorylated serine
GERSPLLSQETAGQKPL

SEQ ID NO: 402 - protein, 9 aa, Artificial Sequence
  Description of Artificial Sequence: Synthetic peptide
  MOD_RES (4)..(4): phosphorylated serine
GETSPRTKI

SEQ ID NO: 403 - protein, 17 aa, Artificial Sequence
  Description of Artificial Sequence: Synthetic peptide
  MOD_RES (10)..(10): phosphorylated serine
GGDDDWTHLSSKEVDPS

SEQ ID NO: 404 - protein, 19 aa, Artificial Sequence
  Description of Artificial Sequence: Synthetic peptide
  MOD_RES (10)..(10): phosphorylated serine
GGDDDWTHLSSKEVDPSTG

SEQ ID NO: 405 - protein, 12 aa, Artificial Sequence
  Description of Artificial Sequence: Synthetic peptide
  MOD_RES (11)..(11): phosphorylated serine
GGSFGGRSSGSP

SEQ ID NO: 406 - protein, 12 aa, Artificial Sequence
  Description of Artificial Sequence: Synthetic peptide
  MOD_RES (11)..(11): phosphorylated serine
GGSFGGRSSGSV

SEQ ID NO: 407 - protein, 9 aa, Artificial Sequence
  Description of Artificial Sequence: Synthetic peptide
  MOD_RES (4)..(4): phosphorylated serine
GIDSPSSSV

SEQ ID NO: 408 - protein, 9 aa, Artificial Sequence
  Description of Artificial Sequence: Synthetic peptide
  MOD_RES (4)..(4): phosphorylated serine
GIMSPLAKK

SEQ ID NO: 409 - protein, 9 aa, Artificial Sequence
  Description of Artificial Sequence: Synthetic peptide
  MOD_RES (5)..(5): phosphorylated threonine
GLAPTPPSM

SEQ ID NO: 410 - protein, 9 aa, Artificial Sequence
  Description of Artificial Sequence: Synthetic peptide
  MOD_RES (4)..(4): phosphorylated serine
GLDSGFHSV

SEQ ID NO: 411 - protein, 10 aa, Artificial Sequence
  Description of Artificial Sequence: Synthetic peptide
  MOD_RES (4)..(4): phosphorylated serine
GLDSLDQVEI

SEQ ID NO: 412 - protein, 9 aa, Artificial Sequence
  Description of Artificial Sequence: Synthetic peptide
  MOD_RES (8)..(8): phosphorylated serine
GLGELLRSL

SEQ ID NO: 413 - protein, 11 aa, Artificial Sequence
  Description of Artificial Sequence: Synthetic peptide
  MOD_RES (7)..(7): phosphorylated serine
GLIRSRSFIFK

SEQ ID NO: 414 - protein, 11 aa, Artificial Sequence
  Description of Artificial Sequence: Synthetic peptide
  MOD_RES (7)..(7): phosphorylated serine
GLIRSRSFIFY

SEQ ID NO: 415 - protein, 10 aa, Artificial Sequence
  Description of Artificial Sequence: Synthetic peptide
  MOD_RES (4)..(4): phosphorylated serine
GLISPELRHL

SEQ ID NO: 416 - protein, 9 aa, Artificial Sequence
  Description of Artificial Sequence: Synthetic peptide
  MOD_RES (4)..(4): phosphorylated serine
GLISPNVQL

SEQ ID NO: 417 - protein, 9 aa, Artificial Sequence
  Description of Artificial Sequence: Synthetic peptide
  MOD_RES (4)..(4): phosphorylated serine
GLISPVWGA

SEQ ID NO: 418 - protein, 11 aa, Artificial Sequence
  Description of Artificial Sequence: Synthetic peptide
  MOD_RES (4)..(4): phosphorylated threonine
GLITPGGFSSV

SEQ ID NO: 419 - protein, 9 aa, Artificial Sequence
  Description of Artificial Sequence: Synthetic peptide
  MOD_RES (5)..(5): phosphorylated serine
GLLDSPTSI

SEQ ID NO: 420 - protein, 9 aa, Artificial Sequence
  Description of Artificial Sequence: Synthetic peptide
  MOD_RES (5)..(5): phosphorylated serine
GLLGSPARL

SEQ ID NO: 421 - protein, 9 aa, Artificial Sequence
  Description of Artificial Sequence: Synthetic peptide
  MOD_RES (5)..(5): phosphorylated serine
GLLGSPVRA

SEQ ID NO: 422 - protein, 9 aa, Artificial Sequence
  Description of Artificial Sequence: Synthetic peptide
  MOD_RES (5)..(5): phosphorylated serine
GLLGSPVRV

SEQ ID NO: 423 - protein, 11 aa, Artificial Sequence
  Description of Artificial Sequence: Synthetic peptide
  MOD_RES (4)..(4): phosphorylated serine
GLLSPARLYAI

SEQ ID NO: 424 - protein, 11 aa, Artificial Sequence
  Description of Artificial Sequence: Synthetic peptide
  MOD_RES (4)..(4): phosphorylated serine
GLLSPARLYAV

SEQ ID NO: 425 - protein, 10 aa, Artificial Sequence
  Description of Artificial Sequence: Synthetic peptide
  MOD_RES (4)..(4): phosphorylated serine
GLLSPRFVDV

SEQ ID NO: 426 - protein, 9 aa, Artificial Sequence
  Description of Artificial Sequence: Synthetic peptide
  MOD_RES (4)..(4): phosphorylated serine
GLLSPRHSL

SEQ ID NO: 427 - protein, 12 aa, Artificial Sequence
  Description of Artificial Sequence: Synthetic peptide
  MOD_RES (11)..(11): phosphorylated serine
GLSFGGRSSGSP

SEQ ID NO: 428 - protein, 12 aa, Artificial Sequence
  Description of Artificial Sequence: Synthetic peptide
  MOD_RES (11)..(11): phosphorylated serine
GLSFGGRSSGSV

SEQ ID NO: 429 - protein, 9 aa, Artificial Sequence
  Description of Artificial Sequence: Synthetic peptide
  MOD_RES (5)..(5): phosphorylated serine
GMLGSPVRV

SEQ ID NO: 430 - protein, 11 aa, Artificial Sequence
  Description of Artificial Sequence: Synthetic peptide
  MOD_RES (4)..(4): phosphorylated serine
GMLSPARLYAI

SEQ ID NO: 431 - protein, 11 aa, Artificial Sequence
  Description of Artificial Sequence: Synthetic peptide
  MOD_RES (4)..(4): phosphorylated serine
GMLSPARLYAV

SEQ ID NO: 432 - protein, 11 aa, Artificial Sequence
  Description of Artificial Sequence: Synthetic peptide
  MOD_RES (4)..(4): phosphorylated serine
GMLSPGKSIEV

SEQ ID NO: 433 - protein, 11 aa, Artificial Sequence
  Description of Artificial Sequence: Synthetic peptide
  MOD_RES (10)..(10): phosphorylated serine
GPKPLFRRMSS

SEQ ID NO: 434 - protein, 12 aa, Artificial Sequence
  Description of Artificial Sequence: Synthetic peptide
  MOD_RES (10)..(10): phosphorylated serine
GPKPLFRRMSSL

SEQ ID NO: 435 - protein, 13 aa, Artificial Sequence
  Description of Artificial Sequence: Synthetic peptide
  MOD_RES (10)..(10): phosphorylated serine
GPKPLFRRMSSLV

SEQ ID NO: 436 - protein, 14 aa, Artificial Sequence
  Description of Artificial Sequence: Synthetic peptide
  MOD_RES (10)..(10): phosphorylated serine
GPKPLFRRMSSLVG

SEQ ID NO: 437 - protein, 15 aa, Artificial Sequence
  Description of Artificial Sequence: Synthetic peptide
  MOD_RES (10)..(10): phosphorylated serine
GPKPLFRRMSSLVGP

SEQ ID NO: 438 - protein, 16 aa, Artificial Sequence
  Description of Artificial Sequence: Synthetic peptide
  MOD_RES (10)..(10): phosphorylated serine
GPKPLFRRMSSLVGPT

SEQ ID NO: 439 - protein, 17 aa, Artificial Sequence
  Description of Artificial Sequence: Synthetic peptide
  MOD_RES (10)..(10): phosphorylated serine
GPKPLFRRMSSLVGPTQ

SEQ ID NO: 440 - protein, 18 aa, Artificial Sequence
  Description of Artificial Sequence: Synthetic peptide
  MOD_RES (10)..(10): phosphorylated serine
GPKPLFRRMSSLVGPTQS

SEQ ID NO: 441 - protein, 10 aa, Artificial Sequence
  Description of Artificial Sequence: Synthetic peptide
  MOD_RES (9)..(9): phosphorylated serine
GPPYQRRGSL

SEQ ID NO: 442 - protein, 9 aa, Artificial Sequence
  Description of Artificial Sequence: Synthetic peptide
  MOD_RES (8)..(8): phosphorylated serine
GPQPGRHSF

SEQ ID NO: 443 - protein, 9 aa, Artificial Sequence
  Description of Artificial Sequence: Synthetic peptide
  MOD_RES (8)..(8): phosphorylated serine
GPQPGRHSL

SEQ ID NO: 444 - protein, 9 aa, Artificial Sequence
  Description of Artificial Sequence: Synthetic peptide
  MOD_RES (8)..(8): phosphorylated serine
GPQPGRHSV

SEQ ID NO: 445 - protein, 10 aa, Artificial Sequence
  Description of Artificial Sequence: Synthetic peptide
  MOD_RES (6)..(6): phosphorylated serine
GPRPGSPSAF

SEQ ID NO: 446 - protein, 10 aa, Artificial Sequence
  Description of Artificial Sequence: Synthetic peptide
  MOD_RES (6)..(6): phosphorylated serine
GPRPGSPSAL

SEQ ID NO: 447 - protein, 10 aa, Artificial Sequence
  Description of Artificial Sequence: Synthetic peptide
  MOD_RES (6)..(6): phosphorylated serine
GPRPGSPSAM

SEQ ID NO: 448 - protein, 10 aa, Artificial Sequence
  Description of Artificial Sequence: Synthetic peptide
  MOD_RES (6)..(6): phosphorylated serine
GPRPGSPSAV

SEQ ID NO: 449 - protein, 8 aa, Artificial Sequence
  Description of Artificial Sequence: Synthetic peptide
  MOD_RES (6)..(6): phosphorylated serine
GPRSASLL

SEQ ID NO: 450 - protein, 10 aa, Artificial Sequence
  Description of Artificial Sequence: Synthetic peptide
  MOD_RES (4)..(4): phosphorylated serine
GPRSASLLSF

SEQ ID NO: 451 - protein, 10 aa, Artificial Sequence
  Description of Artificial Sequence: Synthetic peptide
  MOD_RES (6)..(6): phosphorylated serine
  MOD_RES (9)..(9): phosphorylated serine
GPRSASLLSF

SEQ ID NO: 452 - protein, 10 aa, Artificial Sequence
  Description of Artificial Sequence: Synthetic peptide
  MOD_RES (9)..(9): phosphorylated serine
GPRSASLLSF

SEQ ID NO: 453 - protein, 10 aa, Artificial Sequence
  Description of Artificial Sequence: Synthetic peptide
  MOD_RES (4)..(4): phosphorylated serine
  MOD_RES (6)..(6): phosphorylated serine
GPRSASLLSL

SEQ ID NO: 454 - protein, 10 aa, Artificial Sequence
  Description of Artificial Sequence: Synthetic peptide
  MOD_RES (4)..(4): phosphorylated serine
GPRSASLLSL

SEQ ID NO: 455 - protein, 10 aa, Artificial Sequence
  Description of Artificial Sequence: Synthetic peptide
  MOD_RES (6)..(6): phosphorylated serine
  MOD_RES (9)..(9): phosphorylated serine
GPRSASLLSL

SEQ ID NO: 456 - protein, 10 aa, Artificial Sequence
  Description of Artificial Sequence: Synthetic peptide
  MOD_RES (6)..(6): phosphorylated serine
GPRSASLLSL

SEQ ID NO: 457 - protein, 10 aa, Artificial Sequence
  Description of Artificial Sequence: Synthetic peptide
  MOD_RES (9)..(9): phosphorylated serine
GPRSASLLSL

SEQ ID NO: 458 - protein, 10 aa, Artificial Sequence
  Description of Artificial Sequence: Synthetic peptide
  MOD_RES (4)..(4): phosphorylated serine
GPRSASLLSM

SEQ ID NO: 459 - protein, 10 aa, Artificial Sequence
  Description of Artificial Sequence: Synthetic peptide
  MOD_RES (6)..(6): phosphorylated serine
  MOD_RES (9)..(9): phosphorylated serine
GPRSASLLSM

SEQ ID NO: 460 - protein, 10 aa, Artificial Sequence
  Description of Artificial Sequence: Synthetic peptide
  MOD_RES (9)..(9): phosphorylated serine
GPRSASLLSM

SEQ ID NO: 461 - protein, 10 aa, Artificial Sequence
  Description of Artificial Sequence: Synthetic peptide
  MOD_RES (4)..(4): phosphorylated serine
GPRSASLLSV

SEQ ID NO: 462 - protein, 10 aa, Artificial Sequence
  Description of Artificial Sequence: Synthetic peptide
  MOD_RES (6)..(6): phosphorylated serine
  MOD_RES (9)..(9): phosphorylated serine
GPRSASLLSV

SEQ ID NO: 463 - protein, 10 aa, Artificial Sequence
  Description of Artificial Sequence: Synthetic peptide
  MOD_RES (9)..(9): phosphorylated serine
GPRSASLLSV

SEQ ID NO: 464 - protein, 9 aa, Artificial Sequence
  Description of Artificial Sequence: Synthetic peptide
  MOD_RES (4)..(4): phosphorylated serine
GPRSPKAPP

SEQ ID NO: 465 - protein, 9 aa, Artificial Sequence
  Description of Artificial Sequence: Synthetic peptide
  MOD_RES (4)..(4): phosphorylated serine
GPRSPPVTL

SEQ ID NO: 466 - protein, 9 aa, Artificial Sequence
  Description of Artificial Sequence: Synthetic peptide
  MOD_RES (4)..(4): phosphorylated serine
GQLSPGVQF

SEQ ID NO: 467 - protein, 9 aa, Artificial Sequence
  Description of Artificial Sequence: Synthetic peptide
  MOD_RES (4)..(4): phosphorylated serine
GRKSPPPSF

SEQ ID NO: 468 - protein, 9 aa, Artificial Sequence
  Description of Artificial Sequence: Synthetic peptide
  MOD_RES (4)..(4): phosphorylated serine
GRKSPPPSK

SEQ ID NO: 469 - protein, 9 aa, Artificial Sequence
  Description of Artificial Sequence: Synthetic peptide
  MOD_RES (4)..(4): phosphorylated serine
GRKSPPPSL

SEQ ID NO: 470 - protein, 9 aa, Artificial Sequence
  Description of Artificial Sequence: Synthetic peptide
  MOD_RES (4)..(4): phosphorylated serine
GRKSPPPSM

SEQ ID NO: 471 - protein, 9 aa, Artificial Sequence
  Description of Artificial Sequence: Synthetic peptide
  MOD_RES (4)..(4): phosphorylated serine
GRKSPPPSR

SEQ ID NO: 472 - protein, 9 aa, Artificial Sequence
  Description of Artificial Sequence: Synthetic peptide
  MOD_RES (4)..(4): phosphorylated serine
GRKSPPPSY

SEQ ID NO: 473 - protein, 9 aa, Artificial Sequence
  Description of Artificial Sequence: Synthetic peptide
  MOD_RES (5)..(5): phosphorylated serine
GRLGSPHRF

SEQ ID NO: 474 - protein, 9 aa, Artificial Sequence
  Description of Artificial Sequence: Synthetic peptide
  MOD_RES (5)..(5): phosphorylated serine
GRLGSPHRK

SEQ ID NO: 475 - protein, 9 aa, Artificial Sequence
  Description of Artificial Sequence: Synthetic peptide
  MOD_RES (5)..(5): phosphorylated serine
GRLGSPHRL

SEQ ID NO: 476 - protein, 9 aa, Artificial Sequence
  Description of Artificial Sequence: Synthetic peptide
  MOD_RES (5)..(5): phosphorylated serine
GRLGSPHRM

SEQ ID NO: 477 - protein, 9 aa, Artificial Sequence
  Description of Artificial Sequence: Synthetic peptide
  MOD_RES (5)..(5): phosphorylated serine
GRLGSPHRR

SEQ ID NO: 478 - protein, 9 aa, Artificial Sequence
  Description of Artificial Sequence: Synthetic peptide
  MOD_RES (5)..(5): phosphorylated serine
GRLGSPHRY

SEQ ID NO: 479 - protein, 9 aa, Artificial Sequence
  Description of Artificial Sequence: Synthetic peptide
  MOD_RES (4)..(4): phosphorylated serine
GRLSPAYSL

SEQ ID NO: 480 - protein, 11 aa, Artificial Sequence
  Description of Artificial Sequence: Synthetic peptide
  MOD_RES (4)..(4): phosphorylated serine
GRLSPKASQVF

SEQ ID NO: 481 - protein, 11 aa, Artificial Sequence
  Description of Artificial Sequence: Synthetic peptide
  MOD_RES (4)..(4): phosphorylated serine
GRLSPKASQVK

SEQ ID NO: 482 - protein, 11 aa, Artificial Sequence
  Description of Artificial Sequence: Synthetic peptide
  MOD_RES (4)..(4): phosphorylated serine
GRLSPKASQVL

SEQ ID NO: 483 - protein, 11 aa, Artificial Sequence
  Description of Artificial Sequence: Synthetic peptide
  MOD_RES (4)..(4): phosphorylated serine
GRLSPKASQVM

SEQ ID NO: 484 - protein, 11 aa, Artificial Sequence
  Description of Artificial Sequence: Synthetic peptide
  MOD_RES (4)..(4): phosphorylated serine
GRLSPKASQVR

SEQ ID NO: 485 - protein, 11 aa, Artificial Sequence
  Description of Artificial Sequence: Synthetic peptide
  MOD_RES (4)..(4): phosphorylated serine
GRLSPKASQVY

SEQ ID NO: 486 - protein, 10 aa, Artificial Sequence
  Description of Artificial Sequence: Synthetic peptide
  MOD_RES (4)..(4): phosphorylated serine
GRLSPVPVPF

SEQ ID NO: 487 - protein, 10 aa, Artificial Sequence
  Description of Artificial Sequence: Synthetic peptide
  MOD_RES (4)..(4): phosphorylated serine
GRLSPVPVPK

SEQ ID NO: 488 - protein, 10 aa, Artificial Sequence
  Description of Artificial Sequence: Synthetic peptide
  MOD_RES (4)..(4): phosphorylated serine
GRLSPVPVPL

SEQ ID NO: 489 - protein, 10 aa, Artificial Sequence
  Description of Artificial Sequence: Synthetic peptide
  MOD_RES (4)..(4): phosphorylated serine
GRLSPVPVPM

SEQ ID NO: 490 - protein, 10 aa, Artificial Sequence
  Description of Artificial Sequence: Synthetic peptide
  MOD_RES (4)..(4): phosphorylated serine
GRLSPVPVPR

SEQ ID NO: 491 - protein, 10 aa, Artificial Sequence
  Description of Artificial Sequence: Synthetic peptide
  MOD_RES (4)..(4): phosphorylated serine
GRLSPVPVPY

SEQ ID NO: 492 - protein, 9 aa, Artificial Sequence
  Description of Artificial Sequence: Synthetic peptide
  MOD_RES (4)..(4): phosphorylated serine
GRQSPSFKL

SEQ ID NO: 493 - protein, 9 aa, Artificial Sequence
  Description of Artificial Sequence: Synthetic peptide
  MOD_RES (3)..(3): phosphorylated serine
GRSSPPPGY

SEQ ID NO: 494 - protein, 11 aa, Artificial Sequence
  Description of Artificial Sequence: Synthetic peptide
  MOD_RES (4)..(4): phosphorylated serine
GRSSTASLVKF

SEQ ID NO: 495 - protein, 11 aa, Artificial Sequence
  Description of Artificial Sequence: Synthetic peptide
  MOD_RES (4)..(4): phosphorylated serine
GRSSTASLVKK

SEQ ID NO: 496 - protein, 12 aa, Artificial Sequence
  Description of Artificial Sequence: Synthetic peptide
  MOD_RES (4)..(4): phosphorylated serine
GRSSTASLVKKK

SEQ ID NO: 497 - protein, 11 aa, Artificial Sequence
  Description of Artificial Sequence: Synthetic peptide
  MOD_RES (4)..(4): phosphorylated serine
GRSSTASLVKL

SEQ ID NO: 498 - protein, 11 aa, Artificial Sequence
  Description of Artificial Sequence: Synthetic peptide
  MOD_RES (4)..(4): phosphorylated serine
GRSSTASLVKM

SEQ ID NO: 499 - protein, 11 aa, Artificial Sequence
  Description of Artificial Sequence: Synthetic peptide
  MOD_RES (4)..(4): phosphorylated serine
GRSSTASLVKR

SEQ ID NO: 500 - protein, 11 aa, Artificial Sequence
  Description of Artificial Sequence: Synthetic peptide
  MOD_RES (4)..(4): phosphorylated serine
GRSSTASLVKY

SEQ ID NO: 501 - protein, 8 aa, Artificial Sequence
  Description of Artificial Sequence: Synthetic peptide
  MOD_RES (3)..(3): phosphorylated threonine
GRTGLPDL

SEQ ID NO: 502 - protein, 28 aa, Artificial Sequence
  Description of Artificial Sequence: Synthetic peptide
  MOD_RES (21)..(21): phosphorylated serine
GSALGGGGAGLSGRASGGAQSPLRYLHV

SEQ ID NO: 503 - protein, 11 aa, Artificial Sequence
  Description of Artificial Sequence: Synthetic peptide
  MOD_RES (4)..(4): phosphorylated serine
GSDSSDDGKKY

SEQ ID NO: 504 - protein, 11 aa, Artificial Sequence
  Description of Artificial Sequence: Synthetic peptide
  MOD_RES (4)..(4): phosphorylated serine
GSESSDDGKKY

SEQ ID NO: 505 - protein, 9 aa, Artificial Sequence
  Description of Artificial Sequence: Synthetic peptide
  MOD_RES (2)..(2): phosphorylated serine
GSPHYFSPF

SEQ ID NO: 506 - protein, 12 aa, Artificial Sequence
  Description of Artificial Sequence: Synthetic peptide
  MOD_RES (2)..(2): phosphorylated serine
GSPHYFSPFRPY

SEQ ID NO: 507 - protein, 17 aa, Artificial Sequence
  Description of Artificial Sequence: Synthetic peptide
  MOD_RES (2)..(2): phosphorylated serine
GSPTMVEKGLEPGVFTL

SEQ ID NO: 508 - protein, 10 aa, Artificial Sequence
  Description of Artificial Sequence: Synthetic peptide
  MOD_RES (2)..(2): phosphorylated serine
GSQLAVMMYL

SEQ ID NO: 509 - protein, 11 aa, Artificial Sequence
  Description of Artificial Sequence: Synthetic peptide
  MOD_RES (4)..(4): phosphorylated serine
GTDSSDDGKKY

SEQ ID NO: 510 - protein, 11 aa, Artificial Sequence
  Description of Artificial Sequence: Synthetic peptide
  MOD_RES (4)..(4): phosphorylated serine
GTESSDDGKKY

SEQ ID NO: 511 - protein, 11 aa, Artificial Sequence
  Description of Artificial Sequence: Synthetic peptide
  MOD_RES (7)..(7): phosphorylated serine
GTIRSRSFIFK

SEQ ID NO: 512 - protein, 11 aa, Artificial Sequence
  Description of Artificial Sequence: Synthetic peptide
  MOD_RES (7)..(7): phosphorylated serine
GTIRSRSFIFY

SEQ ID NO: 513 - protein, 6 aa, Artificial Sequence
  Description of Artificial Sequence: Synthetic peptide
  MOD_RES (2)..(2): phosphorylated threonine
GTLPKY

SEQ ID NO: 514 - protein, 13 aa, Artificial Sequence
  Description of Artificial Sequence: Synthetic peptide
  MOD_RES (2)..(2): phosphorylated threonine
GTLRRSDSQQAVK

SEQ ID NO: 515 - protein, 14 aa, Artificial Sequence
  Description of Artificial Sequence: Synthetic peptide
  MOD_RES (2)..(2): phosphorylated threonine
GTLRRSDSQQAVKS

SEQ ID NO: 516 - protein, 16 aa, Artificial Sequence
  Description of Artificial Sequence: Synthetic peptide
  MOD_RES (2)..(2): phosphorylated threonine
GTLRRSDSQQAVKSPP

SEQ ID NO: 517 - protein, 9 aa, Artificial Sequence
  Description of Artificial Sequence: Synthetic peptide
  MOD_RES (4)..(4): phosphorylated serine
GVASPTITV

SEQ ID NO: 518 - protein, 9 aa, Artificial Sequence
  Description of Artificial Sequence: Synthetic peptide
  MOD_RES (4)..(4): phosphorylated serine
GVVSPTFEL

SEQ ID NO: 519 - protein, 8 aa, Artificial Sequence
  Description of Artificial Sequence: Synthetic peptide
  MOD_RES (7)..(7): phosphorylated serine
HEKKAYSF

SEQ ID NO: 520 - protein, 19 aa, Artificial Sequence
  Description of Artificial Sequence: Synthetic peptide
  MOD_RES (17)..(17): phosphorylated serine
  MOD_RES (18)..(18): phosphorylated serine
HKGEIRGASTPFQFRASSP

SEQ ID NO: 521 - protein, 9 aa, Artificial Sequence
  Description of Artificial Sequence: Synthetic peptide
  MOD_RES (4)..(4): phosphorylated serine
HLHSPQHKL

SEQ ID NO: 522 - protein, 8 aa, Artificial Sequence
  Description of Artificial Sequence: Synthetic peptide
  MOD_RES (7)..(7): phosphorylated serine
HPKRSVSL

SEQ ID NO: 523 - protein, 8 aa, Artificial Sequence
  Description of Artificial Sequence: Synthetic peptide
  MOD_RES (4)..(4): phosphorylated serine
HPRSPNVL

SEQ ID NO: 524 - protein, 10 aa, Artificial Sequence
  Description of Artificial Sequence: Synthetic peptide
  MOD_RES (4)..(4): phosphorylated serine
HPRSPNVLSF

SEQ ID NO: 525 - protein, 10 aa, Artificial Sequence
  Description of Artificial Sequence: Synthetic peptide
  MOD_RES (4)..(4): phosphorylated serine
HPRSPNVLSL

SEQ ID NO: 526 - protein, 10 aa, Artificial Sequence
  Description of Artificial Sequence: Synthetic peptide
  MOD_RES (4)..(4): phosphorylated serine
HPRSPNVLSM

SEQ ID NO: 527 - protein, 10 aa, Artificial Sequence
  Description of Artificial Sequence: Synthetic peptide
  MOD_RES (4)..(4): phosphorylated serine
HPRSPNVLSV

SEQ ID NO: 528 - protein, 9 aa, Artificial Sequence
  Description of Artificial Sequence: Synthetic peptide
  MOD_RES (4)..(4): phosphorylated serine
HPRSPTPTF

SEQ ID NO: 529 - protein, 9 aa, Artificial Sequence
  Description of Artificial Sequence: Synthetic peptide
  MOD_RES (6)..(6): phosphorylated threonine
HPRSPTPTF

SEQ ID NO: 530 - protein, 9 aa, Artificial Sequence
  Description of Artificial Sequence: Synthetic peptide
  MOD_RES (4)..(4): phosphorylated serine
HPRSPTPTL

SEQ ID NO: 531 - protein, 9 aa, Artificial Sequence
  Description of Artificial Sequence: Synthetic peptide
  MOD_RES (6)..(6): phosphorylated threonine
HPRSPTPTL

SEQ ID NO: 532 - protein, 9 aa, Artificial Sequence
  Description of Artificial Sequence: Synthetic peptide
  MOD_RES (4)..(4): phosphorylated serine
HPRSPTPTM

SEQ ID NO: 533 - protein, 9 aa, Artificial Sequence
  Description of Artificial Sequence: Synthetic peptide
  MOD_RES (6)..(6): phosphorylated threonine
HPRSPTPTM

SEQ ID NO: 534 - protein, 9 aa, Artificial Sequence
  Description of Artificial Sequence: Synthetic peptide
  MOD_RES (6)..(6): phosphorylated threonine
HPRSPTPTV

SEQ ID NO: 535 - protein, 9 aa, Artificial Sequence
  Description of Artificial Sequence: Synthetic peptide
  MOD_RES (3)..(3): phosphorylated serine
HPSSPTPTV

SEQ ID NO: 536 - protein, 10 aa, Artificial Sequence
  Description of Artificial Sequence: Synthetic peptide
  MOD_RES (4)..(4): phosphorylated serine
HRLSPVKGEF

SEQ ID NO: 537 - protein, 10 aa, Artificial Sequence
  Description of Artificial Sequence: Synthetic peptide
  MOD_RES (4)..(4): phosphorylated serine
HRLSPVKGEK

SEQ ID NO: 538 - protein, 10 aa, Artificial Sequence
  Description of Artificial Sequence: Synthetic peptide
  MOD_RES (4)..(4): phosphorylated serine
HRLSPVKGER

SEQ ID NO: 539 - protein, 10 aa, Artificial Sequence
  Description of Artificial Sequence: Synthetic peptide
  MOD_RES (4)..(4): phosphorylated serine
HRLSPVKGEY

SEQ ID NO: 540 - protein, 9 aa, Artificial Sequence
  Description of Artificial Sequence: Synthetic peptide
  MOD_RES (4)..(4): phosphorylated serine
HRNSMKVFL

SEQ ID NO: 541 - protein, 11 aa, Artificial Sequence
  Description of Artificial Sequence: Synthetic peptide
  MOD_RES (4)..(4): phosphorylated serine
HRNSNPVIAEF

SEQ ID NO: 542 - protein, 11 aa, Artificial Sequence
  Description of Artificial Sequence: Synthetic peptide
  MOD_RES (4)..(4): phosphorylated serine
HRNSNPVIAEK

SEQ ID NO: 543 - protein, 11 aa, Artificial Sequence
  Description of Artificial Sequence: Synthetic peptide
  MOD_RES (4)..(4): phosphorylated serine
HRNSNPVIAEL

SEQ ID NO: 544 - protein, 11 aa, Artificial Sequence
  Description of Artificial Sequence: Synthetic peptide
  MOD_RES (4)..(4): phosphorylated serine
HRNSNPVIAER

SEQ ID NO: 545 - protein, 11 aa, Artificial Sequence
  Description of Artificial Sequence: Synthetic peptide
  MOD_RES (4)..(4): phosphorylated serine
HRNSNPVIAEY

SEQ ID NO: 546 - protein, 9 aa, Artificial Sequence
  Description of Artificial Sequence: Synthetic peptide
  MOD_RES (4)..(4): phosphorylated serine
HRYSTPHAF

SEQ ID NO: 547 - protein, 10 aa, Artificial Sequence
  Description of Artificial Sequence: Synthetic peptide
  MOD_RES (4)..(4): phosphorylated serine
HTASPTGMMK

SEQ ID NO: 548 - protein, 9 aa, Artificial Sequence
  Description of Artificial Sequence: Synthetic peptide
  MOD_RES (4)..(4): phosphorylated threonine
HVYTPSTTK

SEQ ID NO: 549 - protein, 15 aa, Artificial Sequence
  Description of Artificial Sequence: Synthetic peptide
  MOD_RES (5)..(5): phosphorylated tyrosine
IEKIYIMKADTVIVG

SEQ ID NO: 550 - protein, 9 aa, Artificial Sequence
  Description of Artificial Sequence: Synthetic peptide
  MOD_RES (4)..(4): phosphorylated threonine
IIETPHKEI

SEQ ID NO: 551 - protein, 9 aa, Artificial Sequence
  Description of Artificial Sequence: Synthetic peptide
  MOD_RES (4)..(4): phosphorylated threonine
IIETPHKEY

SEQ ID NO: 552 - protein, 9 aa, Artificial Sequence
  Description of Artificial Sequence: Synthetic peptide
  MOD_RES (4)..(4): phosphorylated serine
IISSPLKGY

SEQ ID NO: 553 - protein, 9 aa, Artificial Sequence
  Description of Artificial Sequence: Synthetic peptide
  MOD_RES (4)..(4): phosphorylated serine
IISSPLTGK

SEQ ID NO: 554 - protein, 9 aa, Artificial Sequence
  Description of Artificial Sequence: Synthetic peptide
  MOD_RES (5)..(5): phosphorylated threonine
ILDRTPEKL

SEQ ID NO: 555 - protein, 9 aa, Artificial Sequence
  Description of Artificial Sequence: Synthetic peptide
  MOD_RES (5)..(5): phosphorylated threonine
ILDRTPEKV

SEQ ID NO: 556 - protein, 9 aa, Artificial Sequence
  Description of Artificial Sequence: Synthetic peptide
  MOD_RES (4)..(4): phosphorylated serine
ILDSGIYRI

SEQ ID NO: 557 - protein, 9 aa, Artificial Sequence
  Description of Artificial Sequence: Synthetic peptide
  MOD_RES (4)..(4): phosphorylated serine
ILDSGIYRV

SEQ ID NO: 558 - protein, 8 aa, Artificial Sequence
  Description of Artificial Sequence: Synthetic peptide
  MOD_RES (7)..(7): phosphorylated serine
ILKPRRSL

SEQ ID NO: 559 - protein, 10 aa, Artificial Sequence
  Description of Artificial Sequence: Synthetic peptide
  MOD_RES (4)..(4): phosphorylated serine
ILKSPEIQRA

SEQ ID NO: 560 - protein, 10 aa, Artificial Sequence
  Description of Artificial Sequence: Synthetic peptide
  MOD_RES (4)..(4): phosphorylated serine
ILKSPEIQRV

SEQ ID NO: 561 - protein, 9 aa, Artificial Sequence
  Description of Artificial Sequence: Synthetic peptide
  MOD_RES (4)..(4): phosphorylated threonine
ILQTPQFQM

SEQ ID NO: 562 - protein, 9 aa, Artificial Sequence
  Description of Artificial Sequence: Synthetic peptide
  MOD_RES (5)..(5): phosphorylated serine
ILQVSIPSL

SEQ ID NO: 563 - protein, 9 aa, Artificial Sequence
  Description of Artificial Sequence: Synthetic peptide
  MOD_RES (5)..(5): phosphorylated threonine
IMDRTPEKL

SEQ ID NO: 564 - protein, 9 aa, Artificial Sequence
  Description of Artificial Sequence: Synthetic peptide
  MOD_RES (5)..(5): phosphorylated threonine
IMDRTPEKV

SEQ ID NO: 565 - protein, 9 aa, Artificial Sequence
  Description of Artificial Sequence: Synthetic peptide
  MOD_RES (4)..(4): phosphorylated serine
IMDSGIYRI

SEQ ID NO: 566 - protein, 9 aa, Artificial Sequence
  Description of Artificial Sequence: Synthetic peptide
  MOD_RES (4)..(4): phosphorylated serine
IMDSGIYRV

SEQ ID NO: 567 - protein, 10 aa, Artificial Sequence
  Description of Artificial Sequence: Synthetic peptide
  MOD_RES (4)..(4): phosphorylated serine
IMKSPEIQRA

SEQ ID NO: 568 - protein, 10 aa, Artificial Sequence
  Description of Artificial Sequence: Synthetic peptide
  MOD_RES (4)..(4): phosphorylated serine
IMKSPEIQRV

SEQ ID NO: 569 - protein, 9 aa, Artificial Sequence
  Description of Artificial Sequence: Synthetic peptide
  MOD_RES (8)..(8): phosphorylated serine
INKERRSSL

SEQ ID NO: 570 - protein, 10 aa, Artificial Sequence
  Description of Artificial Sequence: Synthetic peptide
IPVGSSHNSL

SEQ ID NO: 571 - protein, 10 aa, Artificial Sequence
  Description of Artificial Sequence: Synthetic peptide
  MOD_RES (4)..(4): phosphorylated serine
IQFSPPFPGA

SEQ ID NO: 572 - protein, 8 aa, Artificial Sequence
  Description of Artificial Sequence: Synthetic peptide
  MOD_RES (5)..(5): phosphorylated threonine
ISDGTLKY

SEQ ID NO: 573 - protein, 9 aa, Artificial Sequence
  Description of Artificial Sequence: Synthetic peptide
  MOD_RES (5)..(5): phosphorylated threonine
ISDGTPLKY

SEQ ID NO: 574 - protein, 9 aa, Artificial Sequence
  Description of Artificial Sequence: Synthetic peptide
  MOD_RES (7)..(7): phosphorylated threonine
ISDSAHTDY

SEQ ID NO: 575 - protein, 9 aa, Artificial Sequence
  Description of Artificial Sequence: Synthetic peptide
  MOD_RES (4)..(4): phosphorylated serine
ISDSMHSLY

SEQ ID NO: 576 - protein, 9 aa, Artificial Sequence
  Description of Artificial Sequence: Synthetic peptide
  MOD_RES (4)..(4): phosphorylated threonine
ISDTPHKEI

SEQ ID NO: 577 - protein, 9 aa, Artificial Sequence
  Description of Artificial Sequence: Synthetic peptide
  MOD_RES (4)..(4): phosphorylated threonine
ISDTPHKEY

SEQ ID NO: 578 - protein, 8 aa, Artificial Sequence
  Description of Artificial Sequence: Synthetic peptide
  MOD_RES (5)..(5): phosphorylated threonine
ISEGTLKY

SEQ ID NO: 579 - protein, 9 aa, Artificial Sequence
  Description of Artificial Sequence: Synthetic peptide
  MOD_RES (5)..(5): phosphorylated threonine
ISEGTPLKY

SEQ ID NO: 580 - protein, 9 aa, Artificial Sequence
  Description of Artificial Sequence: Synthetic peptide
  MOD_RES (7)..(7): phosphorylated threonine
ISESAHTDY

SEQ ID NO: 581 - protein, 9 aa, Artificial Sequence
  Description of Artificial Sequence: Synthetic peptide
  MOD_RES (4)..(4): phosphorylated serine
ISESMHSLY

SEQ ID NO: 582 - protein, 9 aa, Artificial Sequence
  Description of Artificial Sequence: Synthetic peptide
  MOD_RES (4)..(4): phosphorylated threonine
ISETPHKEI

SEQ ID NO: 583 - protein, 9 aa, Artificial Sequence
  Description of Artificial Sequence: Synthetic peptide
  MOD_RES (4)..(4): phosphorylated threonine
ISETPHKEY

SEQ ID NO: 584 - protein, 9 aa, Artificial Sequence
  Description of Artificial Sequence: Synthetic peptide
  MOD_RES (7)..(7): phosphorylated threonine
ISFSAHTDY

SEQ ID NO: 585 - protein, 9 aa, Artificial Sequence
  Description of Artificial Sequence: Synthetic peptide
  MOD_RES (4)..(4): phosphorylated serine
ISSSMHSLY

SEQ ID NO: 586 - protein, 8 aa, Artificial Sequence
  Description of Artificial Sequence: Synthetic peptide
  MOD_RES (3)..(3): phosphorylated threonine
ISTDRDPL

SEQ ID NO: 587 - protein, 8 aa, Artificial Sequence
  Description of Artificial Sequence: Synthetic peptide
  MOD_RES (3)..(3): phosphorylated threonine
ISTDRDPY

SEQ ID NO: 588 - protein, 8 aa, Artificial Sequence
  Description of Artificial Sequence: Synthetic peptide
  MOD_RES (5)..(5): phosphorylated threonine
ITDGTLKY

SEQ ID NO: 589 - protein, 9 aa, Artificial Sequence
  Description of Artificial Sequence: Synthetic peptide
  MOD_RES (5)..(5): phosphorylated threonine
ITDGTPLKY

SEQ ID NO: 590 - protein, 9 aa, Artificial Sequence
  Description of Artificial Sequence: Synthetic peptide
  MOD_RES (7)..(7): phosphorylated threonine
ITDSAHTDY

SEQ ID NO: 591 - protein, 9 aa, Artificial Sequence
  Description of Artificial Sequence: Synthetic peptide
  MOD_RES (4)..(4): phosphorylated serine
ITDSMHSLY

SEQ ID NO: 592 - protein, 9 aa, Artificial Sequence
  Description of Artificial Sequence: Synthetic peptide
  MOD_RES (4)..(4): phosphorylated threonine
ITDTPHKEI

SEQ ID NO: 593 - protein, 9 aa, Artificial Sequence
  Description of Artificial Sequence: Synthetic peptide
  MOD_RES (4)..(4): phosphorylated threonine
ITDTPHKEY

SEQ ID NO: 594 - protein, 8 aa, Artificial Sequence
  Description of Artificial Sequence: Synthetic peptide
  MOD_RES (5)..(5): phosphorylated threonine
ITEGTLKY

SEQ ID NO: 595 - protein, 9 aa, Artificial Sequence
  Description of Artificial Sequence: Synthetic peptide
  MOD_RES (5)..(5): phosphorylated threonine
ITEGTPLKY

SEQ ID NO: 596 - protein, 9 aa, Artificial Sequence
  Description of Artificial Sequence: Synthetic peptide
  MOD_RES (7)..(7): phosphorylated threonine
ITESAHTDY

SEQ ID NO: 597 - protein, 9 aa, Artificial Sequence
  Description of Artificial Sequence: Synthetic peptide
  MOD_RES (4)..(4): phosphorylated serine
ITESMHSLY

SEQ ID NO: 598 - protein, 9 aa, Artificial Sequence
  Description of Artificial Sequence: Synthetic peptide
  MOD_RES (4)..(4): phosphorylated threonine
ITETPHKEI

SEQ ID NO: 599 - protein, 9 aa, Artificial Sequence
  Description of Artificial Sequence: Synthetic peptide
  MOD_RES (4)..(4): phosphorylated threonine
ITETPHKEY

SEQ ID NO: 600 - protein, 8 aa, Artificial Sequence
  Description of Artificial Sequence: Synthetic peptide
  MOD_RES (5)..(5): phosphorylated threonine
ITQGTLKY

SEQ ID NO: 601 - protein, 9 aa, Artificial Sequence
  Description of Artificial Sequence: Synthetic peptide
  MOD_RES (5)..(5): phosphorylated threonine
ITQGTPLKK

SEQ ID NO: 602 - protein, 9 aa, Artificial Sequence
  Description of Artificial Sequence: Synthetic peptide
  MOD_RES (5)..(5): phosphorylated threonine
ITQGTPLKY

SEQ ID NO: 603 - protein, 8 aa, Artificial Sequence
  Description of Artificial Sequence: Synthetic peptide
  MOD_RES (3)..(3): phosphorylated threonine
ITTDRDPL

SEQ ID NO: 604 - protein, 8 aa, Artificial Sequence
  Description of Artificial Sequence: Synthetic peptide
  MOD_RES (3)..(3): phosphorylated threonine
ITTDRDPY

SEQ ID NO: 605 - protein, 11 aa, Artificial Sequence
  Description of Artificial Sequence: Synthetic peptide
  MOD_RES (4)..(4): phosphorylated serine
IVLSDSEVIQL

SEQ ID NO: 606 - protein, 7 aa, Artificial Sequence
  Description of Artificial Sequence: Synthetic peptide
  MOD_RES (4)..(4): phosphorylated tyrosine
IVRYHQL

SEQ ID NO: 607 - protein, 8 aa, Artificial Sequence
  Description of Artificial Sequence: Synthetic peptide
  MOD_RES (3)..(3): phosphorylated threonine
IVTDRDPL

SEQ ID NO: 608 - protein, 8 aa, Artificial Sequence
  Description of Artificial Sequence: Synthetic peptide
  MOD_RES (3)..(3): phosphorylated threonine
IVTDRDPY

SEQ ID NO: 609 - protein, 9 aa, Artificial Sequence
  Description of Artificial Sequence: Synthetic peptide
  MOD_RES (4)..(4): phosphorylated tyrosine
IYQYIQSRF

SEQ ID NO: 610 - protein, 7 aa, Artificial Sequence
  Description of Artificial Sequence: Synthetic peptide
  MOD_RES (4)..(4): phosphorylated serine
KAFSPVR

SEQ ID NO: 611 - protein, 9 aa, Artificial Sequence
  Description of Artificial Sequence: Synthetic peptide
  MOD_RES (4)..(4): phosphorylated serine
KAFSPVRSV

SEQ ID NO: 612 - protein, 9 aa, Artificial Sequence
  Description of Artificial Sequence: Synthetic peptide
  MOD_RES (4)..(4): phosphorylated serine
KAKSPAPGL

SEQ ID NO: 613 - protein, 9 aa, Artificial Sequence
  Description of Artificial Sequence: Synthetic peptide
  MOD_RES (4)..(4): phosphorylated serine
KAKSPAPGV

SEQ ID NO: 614 - protein, 9 aa, Artificial Sequence
  Description of Artificial Sequence: Synthetic peptide
  MOD_RES (4)..(4): phosphorylated serine
KARSPGRAF

SEQ ID NO: 615 - protein, 9 aa, Artificial Sequence
  Description of Artificial Sequence: Synthetic peptide
  MOD_RES (4)..(4): phosphorylated serine
KARSPGRAL

SEQ ID NO: 616 - protein, 9 aa, Artificial Sequence
  Description of Artificial Sequence: Synthetic peptide
  MOD_RES (4)..(4): phosphorylated serine
KARSPGRAM

SEQ ID NO: 617 - protein, 9 aa, Artificial Sequence
  Description of Artificial Sequence: Synthetic peptide
  MOD_RES (4)..(4): phosphorylated serine
KARSPGRAV

SEQ ID NO: 618 - protein, 9 aa, Artificial Sequence
  Description of Artificial Sequence: Synthetic peptide
  MOD_RES (8)..(8): phosphorylated serine
KASPKRLSL

SEQ ID NO: 619 - protein, 9 aa, Artificial Sequence
  Description of Artificial Sequence: Synthetic peptide
  MOD_RES (4)..(4): phosphorylated serine
  MISC_FEATURE (8)..(8): present in a cysteine-cysteine disulfide bond
KAVSLFLCY

SEQ ID NO: 620 - protein, 9 aa, Artificial Sequence
  Description of Artificial Sequence: Synthetic peptide
  MOD_RES (4)..(4): phosphorylated serine
KAVSLFLCY

SEQ ID NO: 621 - protein, 24 aa, Artificial Sequence
  Description of Artificial Sequence: Synthetic peptide
  MOD_RES (10)..(10): phosphorylated serine
KEGEEPTVYSDEEEPKDESARKND

SEQ ID NO: 622 - protein, 9 aa, Artificial Sequence
  Description of Artificial Sequence: Synthetic peptide
  MOD_RES (4)..(4): phosphorylated serine
KEKSPFRET

SEQ ID NO: 623 - protein, 9 aa, Artificial Sequence
  Description of Artificial Sequence: Synthetic peptide
  MOD_RES (8)..(8): phosphorylated serine
KELARQISF

SEQ ID NO: 624 - protein, 9 aa, Artificial Sequence
  Description of Artificial Sequence: Synthetic peptide
  MOD_RES (4)..(4): phosphorylated serine
KEMSPTRQF

SEQ ID NO: 625 - protein, 9 aa, Artificial Sequence
  Description of Artificial Sequence: Synthetic peptide
  MOD_RES (3)..(3): oxidized methionine
  MOD_RES (4)..(4): phosphorylated serine
KEMSPTRQL

SEQ ID NO: 626 - protein, 9 aa, Artificial Sequence
  Description of Artificial Sequence: Synthetic peptide
  MOD_RES (4)..(4): phosphorylated serine
KEMSPTRQL

SEQ ID NO: 627 - protein, 9 aa, Artificial Sequence
  Description of Artificial Sequence: Synthetic peptide
  MOD_RES (4)..(4): phosphorylated serine
KEMSPTRQW

SEQ ID NO: 628 - protein, 9 aa, Artificial Sequence
  Description of Artificial Sequence: Synthetic peptide
  MOD_RES (4)..(4): phosphorylated serine
KEMSPTRQY

SEQ ID NO: 629 - protein, 11 aa, Artificial Sequence
  Description of Artificial Sequence: Synthetic peptide
  MOD_RES (4)..(4): phosphorylated serine
KESSPLSSRKI

SEQ ID NO: 630 - protein, 9 aa, Artificial Sequence
  Description of Artificial Sequence: Synthetic peptide
  MOD_RES (8)..(8): phosphorylated serine
KFRPPPLSL

SEQ ID NO: 631 - protein, 11 aa, Artificial Sequence
  Description of Artificial Sequence: Synthetic peptide
  MOD_RES (4)..(4): phosphorylated serine
KGISSSSLKEK

SEQ ID NO: 632 - protein, 9 aa, Artificial Sequence
  Description of Artificial Sequence: Synthetic peptide
  MOD_RES (4)..(4): phosphorylated serine
KIASEIAQL

SEQ ID NO: 633 - protein, 10 aa, Artificial Sequence
  Description of Artificial Sequence: Synthetic peptide
  MOD_RES (6)..(6): phosphorylated serine
KIDIVSSQKV

SEQ ID NO: 634 - protein, 10 aa, Artificial Sequence
  Description of Artificial Sequence: Synthetic peptide
  MOD_RES (4)..(4): phosphorylated serine
KIDSPTKVKK

SEQ ID NO: 635 - protein, 16 aa, Artificial Sequence
  Description of Artificial Sequence: Synthetic peptide
  MOD_RES (6)..(6): phosphorylated tyrosine
KIEKIYIMKADTVIVG

SEQ ID NO: 636 - protein, 10 aa, Artificial Sequence
  Description of Artificial Sequence: Synthetic peptide
  MOD_RES (4)..(4): phosphorylated serine
KIESLENLYL

SEQ ID NO: 637 - protein, 9 aa, Artificial Sequence
  Description of Artificial Sequence: Synthetic peptide
  MOD_RES (4)..(4): phosphorylated serine
KIFSGVFVK

SEQ ID NO: 638 - protein, 10 aa, Artificial Sequence
  Description of Artificial Sequence: Synthetic peptide
  MOD_RES (4)..(4): phosphorylated serine
KIFSGVFVKV

SEQ ID NO: 639 - protein, 9 aa, Artificial Sequence
  Description of Artificial Sequence: Synthetic peptide
  MOD_RES (4)..(4): phosphorylated serine
KIFSKQQGK

SEQ ID NO: 640 - protein, 9 aa, Artificial Sequence
  Description of Artificial Sequence: Synthetic peptide
  MOD_RES (4)..(4): phosphorylated serine
KIFSKQQGY

SEQ ID NO: 641 - protein, 9 aa, Artificial Sequence
  Description of Artificial Sequence: Synthetic peptide
  MOD_RES (4)..(4): phosphorylated serine
KIGSIIFQV

SEQ ID NO: 642 - protein, 9 aa, Artificial Sequence
  Description of Artificial Sequence: Synthetic peptide
  MOD_RES (4)..(4): phosphorylated serine
KIKSFEVVF

SEQ ID NO: 643 - protein, 10 aa, Artificial Sequence
  Description of Artificial Sequence: Synthetic peptide
  MOD_RES (5)..(5): phosphorylated serine
KIRSSPREAK

SEQ ID NO: 644 - protein, 10 aa, Artificial Sequence
  Description of Artificial Sequence: Synthetic peptide
  MOD_RES (5)..(5): phosphorylated serine
KIRSSPREAY

SEQ ID NO: 645 - protein, 9 aa, Artificial Sequence
  Description of Artificial Sequence: Synthetic peptide
  MOD_RES (5)..(5): phosphorylated serine
KIRTSPTFR

SEQ ID NO: 646 - protein, 9 aa, Artificial Sequence
  Description of Artificial Sequence: Synthetic peptide
  MOD_RES (5)..(5): phosphorylated serine
KIRTSPTFY

SEQ ID NO: 647 - protein, 11 aa, Artificial Sequence
  Description of Artificial Sequence: Synthetic peptide
  MOD_RES (4)..(4): phosphorylated serine
KLASLEREASV

SEQ ID NO: 648 - protein, 9 aa, Artificial Sequence
  Description of Artificial Sequence: Synthetic peptide
  MOD_RES (4)..(4): phosphorylated serine
KLASLLHQV

SEQ ID NO: 649 - protein, 11 aa, Artificial Sequence
  Description of Artificial Sequence: Synthetic peptide
  MOD_RES (4)..(4): phosphorylated serine
KLASPEKLAGL

SEQ ID NO: 650 - protein, 10 aa, Artificial Sequence
  Description of Artificial Sequence: Synthetic peptide
  MOD_RES (4)..(4): phosphorylated serine
KLASPELERL

SEQ ID NO: 651 - protein, 10 aa, Artificial Sequence
  Description of Artificial Sequence: Synthetic peptide
  MOD_RES (4)..(4): phosphorylated serine
KLASPELERV

SEQ ID NO: 652 - protein, 10 aa, Artificial Sequence
  Description of Artificial Sequence: Synthetic peptide
  MOD_RES (6)..(6): phosphorylated serine
KLDIVSSQKV

SEQ ID NO: 653 - protein, 10 aa, Artificial Sequence
  Description of Artificial Sequence: Synthetic peptide
  MOD_RES (4)..(4): phosphorylated serine
KLDSFLDMQV

SEQ ID NO: 654 - protein, 9 aa, Artificial Sequence
  Description of Artificial Sequence: Synthetic peptide
  MOD_RES (4)..(4): phosphorylated serine
KLDSPRVTV

SEQ ID NO: 655 - protein, 10 aa, Artificial Sequence
  Description of Artificial Sequence: Synthetic peptide
  MOD_RES (4)..(4): phosphorylated serine
KLDSPTKVKK

SEQ ID NO: 656 - protein, 10 aa, Artificial Sequence
  Description of Artificial Sequence: Synthetic peptide
  MOD_RES (4)..(4): phosphorylated serine
KLDSPTKVKY

SEQ ID NO: 657 - protein, 10 aa, Artificial Sequence
  Description of Artificial Sequence: Synthetic peptide
  MOD_RES (6)..(6): phosphorylated threonine
KLFPDTPLAL

SEQ ID NO: 658 - protein, 10 aa, Artificial Sequence
  Description of Artificial Sequence: Synthetic peptide
  MOD_RES (6)..(6): phosphorylated threonine
KLFPDTPLAV

SEQ ID NO: 659 - protein, 9 aa, Artificial Sequence
  Description of Artificial Sequence: Synthetic peptide
  MOD_RES (4)..(4): phosphorylated serine
KLFSGTVRK

SEQ ID NO: 660 - protein, 10 aa, Artificial Sequence
  Description of Artificial Sequence: Synthetic peptide
  MOD_RES (4)..(4): phosphorylated serine
KLFSGVFVKV

SEQ ID NO: 661 - protein, 9 aa, Artificial Sequence
  Description of Artificial Sequence: Synthetic peptide
  MOD_RES (4)..(4): phosphorylated serine
KLFSKQQGK

SEQ ID NO: 662 - protein, 9 aa, Artificial Sequence
  Description of Artificial Sequence: Synthetic peptide
  MOD_RES (4)..(4): phosphorylated serine
KLFSKQQGY

SEQ ID NO: 663 - protein, 9 aa, Artificial Sequence
  Description of Artificial Sequence: Synthetic peptide
  MOD_RES (4)..(4): phosphorylated serine
KLFSPAHKK

SEQ ID NO: 664 - protein, 9 aa, Artificial Sequence
  Description of Artificial Sequence: Synthetic peptide
  MOD_RES (4)..(4): phosphorylated serine
KLFSPAHKY

SEQ ID NO: 665 - protein, 11 aa, Artificial Sequence
  Description of Artificial Sequence: Synthetic peptide
  MOD_RES (4)..(4): phosphorylated serine
KLFSPSKEAEL

SEQ ID NO: 666 - protein, 11 aa, Artificial Sequence
  Description of Artificial Sequence: Synthetic peptide
  MOD_RES (4)..(4): phosphorylated serine
KLFSPSKEAEV

SEQ ID NO: 667 - protein, 11 aa, Artificial Sequence
  Description of Artificial Sequence: Synthetic peptide
  MOD_RES (5)..(5): phosphorylated serine
KLHGSLARAGK

SEQ ID NO: 668 - protein, 11 aa, Artificial Sequence
  Description of Artificial Sequence: Synthetic peptide
  MOD_RES (5)..(5): phosphorylated serine
KLHGSLARAGY

SEQ ID NO: 669 - protein, 11 aa, Artificial Sequence
  Description of Artificial Sequence: Synthetic peptide
  MOD_RES (7)..(7): phosphorylated serine
KLIDIVSSQKV

SEQ ID NO: 670 - protein, 9 aa, Artificial Sequence
  Description of Artificial Sequence: Synthetic peptide
  MOD_RES (8)..(8): phosphorylated serine
KLIDRTESL

SEQ ID NO: 671 - protein, 10 aa, Artificial Sequence
  Description of Artificial Sequence: Synthetic peptide
  MOD_RES (6)..(6): phosphorylated serine
KLIDVSSQKV

SEQ ID NO: 672 - protein, 11 aa, Artificial Sequence
  Description of Artificial Sequence: Synthetic peptide
  MOD_RES (4)..(4): phosphorylated serine
KLISSSSLKEK

SEQ ID NO: 673 - protein, 11 aa, Artificial Sequence
  Description of Artificial Sequence: Synthetic peptide
  MOD_RES (4)..(4): phosphorylated serine
KLISSSSLKEY

SEQ ID NO: 674 - protein, 9 aa, Artificial Sequence
  Description of Artificial Sequence: Synthetic peptide
  MOD_RES (8)..(8): phosphorylated serine
KLKDRLPSI

SEQ ID NO: 675 - protein, 10 aa, Artificial Sequence
  Description of Artificial Sequence: Synthetic peptide
  MOD_RES (4)..(4): phosphorylated serine
KLKSNPDFLK

SEQ ID NO: 676 - protein, 11 aa, Artificial Sequence
  Description of Artificial Sequence: Synthetic peptide
  MOD_RES (4)..(4): phosphorylated serine
KLKSNPDFLKK

SEQ ID NO: 677 - protein, 11 aa, Artificial Sequence
  Description of Artificial Sequence: Synthetic peptide
  MOD_RES (4)..(4): phosphorylated serine
KLKSNPDFLKY

SEQ ID NO: 678 - protein, 9 aa, Artificial Sequence
  Description of Artificial Sequence: Synthetic peptide
  MOD_RES (4)..(4): phosphorylated serine
KLKSPAPGL

SEQ ID NO: 679 - protein, 9 aa, Artificial Sequence
  Description of Artificial Sequence: Synthetic peptide
  MOD_RES (4)..(4): phosphorylated serine
KLKSPAPGV

SEQ ID NO: 680 - protein, 9 aa, Artificial Sequence
  Description of Artificial Sequence: Synthetic peptide
  MOD_RES (4)..(4): phosphorylated serine
KLKSQEIFL

SEQ ID NO: 681 - protein, 11 aa, Artificial Sequence
  Description of Artificial Sequence: Synthetic peptide
  MOD_RES (5)..(5): phosphorylated serine
KLKSSPLIEKK

SEQ ID NO: 682 - protein, 11 aa, Artificial Sequence
  Description of Artificial Sequence: Synthetic peptide
  MOD_RES (5)..(5): phosphorylated serine
KLKSSPLIEKY

SEQ ID NO: 683 - protein, 9 aa, Artificial Sequence
  Description of Artificial Sequence: Synthetic peptide
  MOD_RES (4)..(4): phosphorylated threonine
KLKTPLVAK

SEQ ID NO: 684 - protein, 9 aa, Artificial Sequence
  Description of Artificial Sequence: Synthetic peptide
  MOD_RES (4)..(4): phosphorylated threonine
KLKTPLVAR

SEQ ID NO: 685 - protein, 13 aa, Artificial Sequence
  Description of Artificial Sequence: Synthetic peptide
  MOD_RES (9)..(9): phosphorylated serine
KLLDFGSLSNLQV

SEQ ID NO: 686 - protein, 9 aa, Artificial Sequence
  Description of Artificial Sequence: Synthetic peptide
  MOD_RES (8)..(8): phosphorylated serine
KLLQFYPSL

SEQ ID NO: 687 - protein, 9 aa, Artificial Sequence
  Description of Artificial Sequence: Synthetic peptide
  MOD_RES (8)..(8): phosphorylated serine
KLLQFYPSV

SEQ ID NO: 688 - protein, 10 aa, Artificial Sequence
  Description of Artificial Sequence: Synthetic peptide
  MOD_RES (4)..(4): phosphorylated serine
KLLSPSDEKL

SEQ ID NO: 689 - protein, 10 aa, Artificial Sequence
  Description of Artificial Sequence: Synthetic peptide
  MOD_RES (4)..(4): phosphorylated serine
KLLSPSNEKL

SEQ ID NO: 690 - protein, 10 aa, Artificial Sequence
  Description of Artificial Sequence: Synthetic peptide
  MOD_RES (4)..(4): phosphorylated serine
KLLSPSNEKV

SEQ ID NO: 691 - protein, 10 aa, Artificial Sequence
  Description of Artificial Sequence: Synthetic peptide
  MOD_RES (9)..(9): phosphorylated threonine
KLLSSAQRTL

SEQ ID NO: 692 - protein, 10 aa, Artificial Sequence
  Description of Artificial Sequence: Synthetic peptide
  MOD_RES (9)..(9): phosphorylated threonine
KLLSSAQRTV

SEQ ID NO: 693 - protein, 10 aa, Artificial Sequence
  Description of Artificial Sequence: Synthetic peptide
  MOD_RES (4)..(4): phosphorylated serine
KLLSTEEMEL

SEQ ID NO: 694 - protein, 10 aa, Artificial Sequence
  Description of Artificial Sequence: Synthetic peptide
  MOD_RES (4)..(4): phosphorylated serine
KLLSTEEMEV

SEQ ID NO: 695 - protein, 9 aa, Artificial Sequence
  Description of Artificial Sequence: Synthetic peptide
  MOD_RES (4)..(4): phosphorylated serine
KLLSVERIK

SEQ ID NO: 696 - protein, 9 aa, Artificial Sequence
  Description of Artificial Sequence: Synthetic peptide
  MOD_RES (4)..(4): phosphorylated threonine
KLLTPIKEK

SEQ ID NO: 697 - protein, 9 aa, Artificial Sequence
  Description of Artificial Sequence: Synthetic peptide
  MOD_RES (4)..(4): phosphorylated threonine
KLLTPIKEY

SEQ ID NO: 698 - protein, 9 aa, Artificial Sequence
  Description of Artificial Sequence: Synthetic peptide
  MOD_RES (8)..(8): phosphorylated serine
KLMAPDISL

SEQ ID NO: 699 - protein, 9 aa, Artificial Sequence
  Description of Artificial Sequence: Synthetic peptide
  MOD_RES (8)..(8): phosphorylated serine
KLMAPDISV

SEQ ID NO: 700 - protein, 10 aa, Artificial Sequence
  Description of Artificial Sequence: Synthetic peptide
  MOD_RES (9)..(9): phosphorylated serine
KLMIDRTESV

SEQ ID NO: 701 - protein, 9 aa, Artificial Sequence
  Description of Artificial Sequence: Synthetic peptide
  MOD_RES (4)..(4): phosphorylated serine
KLMSDVEDV

SEQ ID NO: 702 - protein, 9 aa, Artificial Sequence
  Description of Artificial Sequence: Synthetic peptide
  MOD_RES (4)..(4): phosphorylated serine
KLMSPKADV

SEQ ID NO: 703 - protein, 11 aa, Artificial Sequence
  Description of Artificial Sequence: Synthetic peptide
  MOD_RES (4)..(4): phosphorylated serine
KLMSPKADVKL

SEQ ID NO: 704 - protein, 11 aa, Artificial Sequence
  Description of Artificial Sequence: Synthetic peptide
  MOD_RES (4)..(4): phosphorylated serine
KLMSPKADVKV

SEQ ID NO: 705 - protein, 9 aa, Artificial Sequence
  Description of Artificial Sequence: Synthetic peptide
  MOD_RES (5)..(5): phosphorylated serine
KLPDSPALA

SEQ ID NO: 706 - protein, 10 aa, Artificial Sequence
  Description of Artificial Sequence: Synthetic peptide
  MOD_RES (5)..(5): phosphorylated serine
KLPDSPALAK

SEQ ID NO: 707 - protein, 11 aa, Artificial Sequence
  Description of Artificial Sequence: Synthetic peptide
  MOD_RES (5)..(5): phosphorylated serine
KLPDSPALAKK

SEQ ID NO: 708 - protein, 11 aa, Artificial Sequence
  Description of Artificial Sequence: Synthetic peptide
  MOD_RES (5)..(5): phosphorylated serine
KLPDSPALAKY

SEQ ID NO: 709 - protein, 10 aa, Artificial Sequence
  Description of Artificial Sequence: Synthetic peptide
  MOD_RES (5)..(5): phosphorylated serine
KLPDSPALAY

SEQ ID NO: 710 - protein, 10 aa, Artificial Sequence
  Description of Artificial Sequence: Synthetic peptide
  MOD_RES (4)..(4): phosphorylated serine
KLPSPAPARK

SEQ ID NO: 711 - protein, 10 aa, Artificial Sequence
  Description of Artificial Sequence: Synthetic peptide
  MOD_RES (5)..(5): phosphorylated serine
KLPTSPLKMK

SEQ ID NO: 712 - protein, 10 aa, Artificial Sequence
  Description of Artificial Sequence: Synthetic peptide
  MOD_RES (5)..(5): phosphorylated serine
KLPTSPLKMY

SEQ ID NO: 713 - protein, 10 aa, Artificial Sequence
  Description of Artificial Sequence: Synthetic peptide
  MOD_RES (5)..(5): phosphorylated threonine
KLPTTPVKAK

SEQ ID NO: 714 - protein, 10 aa, Artificial Sequence
  Description of Artificial Sequence: Synthetic peptide
  MOD_RES (5)..(5): phosphorylated threonine
KLPTTPVKAY

SEQ ID NO: 715 - protein, 9 aa, Artificial Sequence
  Description of Artificial Sequence: Synthetic peptide
  MOD_RES (8)..(8): phosphorylated threonine
KLQEFLQTL

SEQ ID NO: 716 - protein, 9 aa, Artificial Sequence
  Description of Artificial Sequence: Synthetic peptide
  MOD_RES (5)..(5): phosphorylated threonine
KLQVTSLSV

SEQ ID NO: 717 - protein, 9 aa, Artificial Sequence
  Description of Artificial Sequence: Synthetic peptide
  MOD_RES (4)..(4): phosphorylated serine
KLRSPFLQK

SEQ ID NO: 718 - protein, 9 aa, Artificial Sequence
  Description of Artificial Sequence: Synthetic peptide
  MOD_RES (4)..(4): phosphorylated serine
KLRSPFLQY

SEQ ID NO: 719 - protein, 10 aa, Artificial Sequence
  Description of Artificial Sequence: Synthetic peptide
  MOD_RES (5)..(5): phosphorylated serine
KLRSSPREAK

SEQ ID NO: 720 - protein, 9 aa, Artificial Sequence
  Description of Artificial Sequence: Synthetic peptide
  MOD_RES (5)..(5): phosphorylated serine
KLRTSPTFK

SEQ ID NO: 721 - protein, 10 aa, Artificial Sequence
  Description of Artificial Sequence: Synthetic peptide
  MOD_RES (3)..(3): phosphorylated serine
KLSGDQPAAR

SEQ ID NO: 722 - protein, 7 aa, Artificial Sequence
  Description of Artificial Sequence: Synthetic peptide
  MOD_RES (6)..(6): phosphorylated serine
KLSGLSF

SEQ ID NO: 723 - protein, 9 aa, Artificial Sequence
  Description of Artificial Sequence: Synthetic peptide
  MOD_RES (4)..(4): phosphorylated serine
KLSSLGNLK

SEQ ID NO: 724 - protein, 10 aa, Artificial Sequence
  Description of Artificial Sequence: Synthetic peptide
  MOD_RES (4)..(4): phosphorylated serine
KLSSLGNLKK

SEQ ID NO: 725 - protein, 10 aa, Artificial Sequence
  Description of Artificial Sequence: Synthetic peptide
  MOD_RES (4)..(4): phosphorylated serine
KLSSLGNLKY

SEQ ID NO: 726 - protein, 10 aa, Artificial Sequence
  Description of Artificial Sequence: Synthetic peptide
  MOD_RES (4)..(4): phosphorylated serine
KLSSPRGGMK

SEQ ID NO: 727 - protein, 11 aa, Artificial Sequence
  Description of Artificial Sequence: Synthetic peptide
  MOD_RES (4)..(4): phosphorylated serine
KLSSPRGGMKK

SEQ ID NO: 728 - protein, 11 aa, Artificial Sequence
  Description of Artificial Sequence: Synthetic peptide
  MOD_RES (4)..(4): phosphorylated serine
KLSSPRGGMKY

SEQ ID NO: 729 - protein, 15 aa, Artificial Sequence
  Description of Artificial Sequence: Synthetic peptide
  MOD_RES (3)..(3): phosphorylated serine
KLSVIAEDSESGKQN

SEQ ID NO: 730 - protein, 16 aa, Artificial Sequence
  Description of Artificial Sequence: Synthetic peptide
  MOD_RES (3)..(3): phosphorylated serine
KLSVIAEDSESGKQNP

SEQ ID NO: 731 - protein, 17 aa, Artificial Sequence
  Description of Artificial Sequence: Synthetic peptide
  MOD_RES (3)..(3): phosphorylated serine
KLSVIAEDSESGKQNPG

SEQ ID NO: 732 - protein, 13 aa, Artificial Sequence
  Description of Artificial Sequence: Synthetic peptide
  MOD_RES (9)..(9): phosphorylated serine
KLVSFHDDSDEDL

SEQ ID NO: 733 - protein, 10 aa, Artificial Sequence
  Description of Artificial Sequence: Synthetic peptide
  MOD_RES (4)..(4): phosphorylated serine
KLYSEIDIKV

SEQ ID NO: 734 - protein, 9 aa, Artificial Sequence
  Description of Artificial Sequence: Synthetic peptide
  MOD_RES (4)..(4): phosphorylated serine
KLYSGNMEK

SEQ ID NO: 735 - protein, 9 aa, Artificial Sequence
  Description of Artificial Sequence: Synthetic peptide
  MOD_RES (4)..(4): phosphorylated serine
KMASLLHQV

SEQ ID NO: 736 - protein, 10 aa, Artificial Sequence
  Description of Artificial Sequence: Synthetic peptide
  MOD_RES (4)..(4): phosphorylated serine
KMASPELERL

SEQ ID NO: 737 - protein, 10 aa, Artificial Sequence
  Description of Artificial Sequence: Synthetic peptide
  MOD_RES (4)..(4): phosphorylated serine
KMASPELERV

SEQ ID NO: 738 - protein, 10 aa, Artificial Sequence
  Description of Artificial Sequence: Synthetic peptide
  MOD_RES (6)..(6): phosphorylated serine
KMDIVSSQKV

SEQ ID NO: 739 - protein, 10 aa, Artificial Sequence
  Description of Artificial Sequence: Synthetic peptide
  MOD_RES (4)..(4): phosphorylated serine
KMDSFLDMQL

SEQ ID NO: 740 - protein, 10 aa, Artificial Sequence
  Description of Artificial Sequence: Synthetic peptide
  MOD_RES (4)..(4): phosphorylated serine
KMDSFLDMQV

SEQ ID NO: 741 - protein, 9 aa, Artificial Sequence
  Description of Artificial Sequence: Synthetic peptide
  MOD_RES (4)..(4): phosphorylated serine
KMDSPRVTV

SEQ ID NO: 742 - protein, 10 aa, Artificial Sequence
  Description of Artificial Sequence: Synthetic peptide
  MOD_RES (4)..(4): phosphorylated serine
KMDSPTKVKK

SEQ ID NO: 743 - protein, 10 aa, Artificial Sequence
  Description of Artificial Sequence: Synthetic peptide
  MOD_RES (6)..(6): phosphorylated threonine
KMFPDTPLAL

SEQ ID NO: 744 - protein, 10 aa, Artificial Sequence
  Description of Artificial Sequence: Synthetic peptide
  MOD_RES (6)..(6): phosphorylated threonine
KMFPDTPLAV

SEQ ID NO: 745 - protein, 9 aa, Artificial Sequence
  Description of Artificial Sequence: Synthetic peptide
  MOD_RES (4)..(4): phosphorylated serine
KMFSGTVRK

SEQ ID NO: 746 - protein, 10 aa, Artificial Sequence
  Description of Artificial Sequence: Synthetic peptide
  MOD_RES (4)..(4): phosphorylated serine
KMFSGVFVKV

SEQ ID NO: 747 - protein, 9 aa, Artificial Sequence
  Description of Artificial Sequence: Synthetic peptide
  MOD_RES (4)..(4): phosphorylated serine
KMFSKQQGK

SEQ ID NO: 748 - protein, 9 aa, Artificial Sequence
  Description of Artificial Sequence: Synthetic peptide
  MOD_RES (4)..(4): phosphorylated serine
KMFSPAHKK

SEQ ID NO: 749 - protein, 11 aa, Artificial Sequence
  Description of Artificial Sequence: Synthetic peptide
  MOD_RES (4)..(4): phosphorylated serine
KMFSPSKEAEL

SEQ ID NO: 750 - protein, 11 aa, Artificial Sequence
  Description of Artificial Sequence: Synthetic peptide
  MOD_RES (4)..(4): phosphorylated serine
KMFSPSKEAEV

SEQ ID NO: 751 - protein, 11 aa, Artificial Sequence
  Description of Artificial Sequence: Synthetic peptide
  MOD_RES (5)..(5): phosphorylated serine
KMHGSLARAGK

SEQ ID NO: 752 - protein, 11 aa, Artificial Sequence
  Description of Artificial Sequence: Synthetic peptide
  MOD_RES (7)..(7): phosphorylated serine
KMIDIVSSQKV

SEQ ID NO: 753 - protein, 9 aa, Artificial Sequence
  Description of Artificial Sequence: Synthetic peptide
  MOD_RES (8)..(8): phosphorylated serine
KMIDRTESL

SEQ ID NO: 754 - protein, 11 aa, Artificial Sequence
  Description of Artificial Sequence: Synthetic peptide
  MOD_RES (4)..(4): phosphorylated serine
KMISSSSLKEK

SEQ ID NO: 755 - protein, 10 aa, Artificial Sequence
  Description of Artificial Sequence: Synthetic peptide
  MOD_RES (4)..(4): phosphorylated serine
KMKSNPDFLK

SEQ ID NO: 756 - protein, 11 aa, Artificial Sequence
  Description of Artificial Sequence: Synthetic peptide
  MOD_RES (4)..(4): phosphorylated serine
KMKSNPDFLKK

SEQ ID NO: 757 - protein, 11 aa, Artificial Sequence
  Description of Artificial Sequence: Synthetic peptide
  MOD_RES (4)..(4): phosphorylated serine
KMKSNPDFLKY

SEQ ID NO: 758 - protein, 11 aa, Artificial Sequence
  Description of Artificial Sequence: Synthetic peptide
  MOD_RES (5)..(5): phosphorylated serine
KMKSSPLIEKK

SEQ ID NO: 759 - protein, 9 aa, Artificial Sequence
  Description of Artificial Sequence: Synthetic peptide
  MOD_RES (4)..(4): phosphorylated threonine
KMKTPLVAK

SEQ ID NO: 760 - protein, 9 aa, Artificial Sequence
  Description of Artificial Sequence: Synthetic peptide
  MOD_RES (4)..(4): phosphorylated threonine
KMKTPLVAR

SEQ ID NO: 761 - protein, 13 aa, Artificial Sequence
  Description of Artificial Sequence: Synthetic peptide
  MOD_RES (9)..(9): phosphorylated serine
KMLDFGSLSNLQV

SEQ ID NO: 762 - protein, 13 aa, Artificial Sequence
  Description of Artificial Sequence: Synthetic peptide
  MOD_RES (9)..(9): phosphorylated serine
KMLDFGSLSNLQV

SEQ ID NO: 763 - protein, 9 aa, Artificial Sequence
  Description of Artificial Sequence: Synthetic peptide
  MOD_RES (8)..(8): phosphorylated serine
KMLQFYPSL

SEQ ID NO: 764 - protein, 10 aa, Artificial Sequence
  Description of Artificial Sequence: Synthetic peptide
  MOD_RES (4)..(4): phosphorylated serine
KMLSPSNEKL

SEQ ID NO: 765 - protein, 10 aa, Artificial Sequence
  Description of Artificial Sequence: Synthetic peptide
  MOD_RES (4)..(4): phosphorylated serine
KMLSPSNEKV

SEQ ID NO: 766 - protein, 10 aa, Artificial Sequence
  Description of Artificial Sequence: Synthetic peptide
  MOD_RES (9)..(9): phosphorylated threonine
KMLSSAQRTL

SEQ ID NO: 767 - protein, 10 aa, Artificial Sequence
  Description of Artificial Sequence: Synthetic peptide
  MOD_RES (9)..(9): phosphorylated threonine
KMLSSAQRTV

SEQ ID NO: 768 - protein, 9 aa, Artificial Sequence
  Description of Artificial Sequence: Synthetic peptide
  MOD_RES (4)..(4): phosphorylated serine
KMLSVERIK

SEQ ID NO: 769 - protein, 9 aa, Artificial Sequence
  Description of Artificial Sequence: Synthetic peptide
  MOD_RES (4)..(4): phosphorylated threonine
KMLTPIKEK

SEQ ID NO: 770 - protein, 9 aa, Artificial Sequence
  Description of Artificial Sequence: Synthetic peptide
  MOD_RES (8)..(8): phosphorylated serine
KMMAPDISV

SEQ ID NO: 771 - protein, 11 aa, Artificial Sequence
  Description of Artificial Sequence: Synthetic peptide
  MOD_RES (4)..(4): phosphorylated serine
KMMSPKADVKL

SEQ ID NO: 772 - protein, 11 aa, Artificial Sequence
  Description of Artificial Sequence: Synthetic peptide
  MOD_RES (4)..(4): phosphorylated serine
KMMSPKADVKV

SEQ ID NO: 773 - protein, 10 aa, Artificial Sequence
  Description of Artificial Sequence: Synthetic peptide
  MOD_RES (5)..(5): phosphorylated serine
KMPTSPLKMK

SEQ ID NO: 774 - protein, 10 aa, Artificial Sequence
  Description of Artificial Sequence: Synthetic peptide
  MOD_RES (5)..(5): phosphorylated threonine
KMPTTPVKAK

SEQ ID NO: 775 - protein, 10 aa, Artificial Sequence
  Description of Artificial Sequence: Synthetic peptide
  MOD_RES (5)..(5): phosphorylated threonine
KMPTTPVKAY

SEQ ID NO: 776 - protein, 9 aa, Artificial Sequence
  Description of Artificial Sequence: Synthetic peptide
  MOD_RES (4)..(4): phosphorylated serine
KMRSPFLQK

SEQ ID NO: 777 - protein, 10 aa, Artificial Sequence
  Description of Artificial Sequence: Synthetic peptide
  MOD_RES (5)..(5): phosphorylated serine
KMRSSPREAK

SEQ ID NO: 778 - protein, 9 aa, Artificial Sequence
  Description of Artificial Sequence: Synthetic peptide
  MOD_RES (5)..(5): phosphorylated serine
KMRTSPTFK

SEQ ID NO: 779 - protein, 9 aa, Artificial Sequence
  Description of Artificial Sequence: Synthetic peptide
  MOD_RES (4)..(4): phosphorylated serine
KMSSLGNLK

SEQ ID NO: 780 - protein, 10 aa, Artificial Sequence
  Description of Artificial Sequence: Synthetic peptide
  MOD_RES (4)..(4): phosphorylated serine
KMSSLGNLKK

SEQ ID NO: 781 - protein, 10 aa, Artificial Sequence
  Description of Artificial Sequence: Synthetic peptide
  MOD_RES (4)..(4): phosphorylated serine
KMSSLGNLKY

SEQ ID NO: 782 - protein, 10 aa, Artificial Sequence
  Description of Artificial Sequence: Synthetic peptide
  MOD_RES (4)..(4): phosphorylated serine
KMSSPRGGMK

SEQ ID NO: 783 - protein, 11 aa, Artificial Sequence
  Description of Artificial Sequence: Synthetic peptide
  MOD_RES (4)..(4): phosphorylated serine
KMSSPRGGMKK

SEQ ID NO: 784 - protein, 10 aa, Artificial Sequence
  Description of Artificial Sequence: Synthetic peptide
  MOD_RES (4)..(4): phosphorylated serine
KMYSEIDIKV

SEQ ID NO: 785 - protein, 9 aa, Artificial Sequence
  Description of Artificial Sequence: Synthetic peptide
  MOD_RES (4)..(4): phosphorylated serine
KMYSGNMEK

SEQ ID NO: 786 - protein, 8 aa, Artificial Sequence
  Description of Artificial Sequence: Synthetic peptide
  MOD_RES (4)..(4): phosphorylated serine
KNRSWKYN

SEQ ID NO: 787 - protein, 9 aa, Artificial Sequence
  Description of Artificial Sequence: Synthetic peptide
  MOD_RES (4)..(4): phosphorylated serine
KNRSWKYNQ

SEQ ID NO: 788 - protein, 14 aa, Artificial Sequence
  Description of Artificial Sequence: Synthetic peptide
  MOD_RES (4)..(4): phosphorylated serine
KNRSWKYNQSISLR

SEQ ID NO: 789 - protein, 16 aa, Artificial Sequence
  Description of Artificial Sequence: Synthetic peptide
  MOD_RES (4)..(4): phosphorylated serine
KNRSWKYNQSISLRRP

SEQ ID NO: 790 - protein, 9 aa, Artificial Sequence
  Description of Artificial Sequence: Synthetic peptide
  MOD_RES (4)..(4): phosphorylated serine
KPASPARRF

SEQ ID NO: 791 - protein, 9 aa, Artificial Sequence
  Description of Artificial Sequence: Synthetic peptide
  MOD_RES (4)..(4): phosphorylated serine
KPASPARRL

SEQ ID NO: 792 - protein, 9 aa, Artificial Sequence
  Description of Artificial Sequence: Synthetic peptide
  MOD_RES (4)..(4): phosphorylated serine
KPASPARRM

SEQ ID NO: 793 - protein, 9 aa, Artificial Sequence
  Description of Artificial Sequence: Synthetic peptide
  MOD_RES (4)..(4): phosphorylated serine
KPASPARRV

SEQ ID NO: 794 - protein, 11 aa, Artificial Sequence
  Description of Artificial Sequence: Synthetic peptide
  MOD_RES (4)..(4): phosphorylated serine
KPASPKFIVTF

SEQ ID NO: 795 - protein, 11 aa, Artificial Sequence
  Description of Artificial Sequence: Synthetic peptide
  MOD_RES (4)..(4): phosphorylated serine
KPASPKFIVTL

SEQ ID NO: 796 - protein, 11 aa, Artificial Sequence
  Description of Artificial Sequence: Synthetic peptide
  MOD_RES (4)..(4): phosphorylated serine
KPASPKFIVTM

SEQ ID NO: 797 - protein, 11 aa, Artificial Sequence
  Description of Artificial Sequence: Synthetic peptide
  MOD_RES (4)..(4): phosphorylated serine
KPASPKFIVTV

SEQ ID NO: 798 - protein, 9 aa, Artificial Sequence
  Description of Artificial Sequence: Synthetic peptide
  MOD_RES (4)..(4): phosphorylated serine
KPESRRSSL

SEQ ID NO: 799 - protein, 10 aa, Artificial Sequence
  Description of Artificial Sequence: Synthetic peptide
  MOD_RES (4)..(4): phosphorylated serine
  MOD_RES (7)..(7): phosphorylated serine
KPESRRSSLL

SEQ ID NO: 800 - protein, 10 aa, Artificial Sequence
  Description of Artificial Sequence: Synthetic peptide
  MOD_RES (4)..(4): phosphorylated serine
  MOD_RES (8)..(8): phosphorylated serine
KPESRRSSLL

SEQ ID NO: 801 - protein, 10 aa, Artificial Sequence
  Description of Artificial Sequence: Synthetic peptide
  MOD_RES (4)..(4): phosphorylated serine
KPESRRSSLL

SEQ ID NO: 802 - protein, 9 aa, Artificial Sequence
  Description of Artificial Sequence: Synthetic peptide
  MOD_RES (6)..(6): phosphorylated serine
KPLIRSQSL

SEQ ID NO: 803 - protein, 9 aa, Artificial Sequence
  Description of Artificial Sequence: Synthetic peptide
  MOD_RES (8)..(8): phosphorylated serine
KPLIRSQSL

SEQ ID NO: 804 - protein, 9 aa, Artificial Sequence
  Description of Artificial Sequence: Synthetic peptide
  MOD_RES (5)..(5): phosphorylated serine
KPPHSPLVF

SEQ ID NO: 805 - protein, 9 aa, Artificial Sequence
  Description of Artificial Sequence: Synthetic peptide
  MOD_RES (5)..(5): phosphorylated serine
KPPHSPLVL

SEQ ID NO: 806 - protein, 9 aa, Artificial Sequence
  Description of Artificial Sequence: Synthetic peptide
  MOD_RES (5)..(5): phosphorylated serine
KPPHSPLVM

SEQ ID NO: 807 - protein, 9 aa, Artificial Sequence
  Description of Artificial Sequence: Synthetic peptide
  MOD_RES (5)..(5): phosphorylated serine
KPPHSPLVV

SEQ ID NO: 808 - protein, 10 aa, Artificial Sequence
  Description of Artificial Sequence: Synthetic peptide
  MOD_RES (4)..(4): phosphorylated serine
KPPSPEHQSF

SEQ ID NO: 809 - protein, 10 aa, Artificial Sequence
  Description of Artificial Sequence: Synthetic peptide
  MOD_RES (4)..(4): phosphorylated serine
KPPSPEHQSL

SEQ ID NO: 810 - protein, 10 aa, Artificial Sequence
  Description of Artificial Sequence: Synthetic peptide
  MOD_RES (4)..(4): phosphorylated serine
KPPSPEHQSM

SEQ ID NO: 811 - protein, 10 aa, Artificial Sequence
  Description of Artificial Sequence: Synthetic peptide
  MOD_RES (4)..(4): phosphorylated serine
KPPSPEHQSV

SEQ ID NO: 812 - protein, 10 aa, Artificial Sequence
  Description of Artificial Sequence: Synthetic peptide
  MOD_RES (4)..(4): phosphorylated serine
KPPSPSPIEF

SEQ ID NO: 813 - protein, 10 aa, Artificial Sequence
  Description of Artificial Sequence: Synthetic peptide
  MOD_RES (4)..(4): phosphorylated serine
KPPSPSPIEL

SEQ ID NO: 814 - protein, 10 aa, Artificial Sequence
  Description of Artificial Sequence: Synthetic peptide
  MOD_RES (4)..(4): phosphorylated serine
KPPSPSPIEM

SEQ ID NO: 815 - protein, 10 aa, Artificial Sequence
  Description of Artificial Sequence: Synthetic peptide
  MOD_RES (4)..(4): phosphorylated serine
KPPSPSPIEV

SEQ ID NO: 816 - protein, 9 aa, Artificial Sequence
  Description of Artificial Sequence: Synthetic peptide
  MOD_RES (4)..(4): phosphorylated threonine
KPPTPGASF

SEQ ID NO: 817 - protein, 9 aa, Artificial Sequence
  Description of Artificial Sequence: Synthetic peptide
  MOD_RES (4)..(4): phosphorylated threonine
KPPTPGASL

SEQ ID NO: 818 - protein, 9 aa, Artificial Sequence
  Description of Artificial Sequence: Synthetic peptide
  MOD_RES (4)..(4): phosphorylated threonine
KPPTPGASM

SEQ ID NO: 819 - protein, 9 aa, Artificial Sequence
  Description of Artificial Sequence: Synthetic peptide
  MOD_RES (4)..(4): phosphorylated threonine
KPPTPGASV

SEQ ID NO: 820 - protein, 9 aa, Artificial Sequence
  Description of Artificial Sequence: Synthetic peptide
  MOD_RES (8)..(8): phosphorylated serine
KPPYRSHSF

SEQ ID NO: 821 - protein, 9 aa, Artificial Sequence
  Description of Artificial Sequence: Synthetic peptide
  MOD_RES (8)..(8): phosphorylated serine
KPPYRSHSL

SEQ ID NO: 822 - protein, 9 aa, Artificial Sequence
  Description of Artificial Sequence: Synthetic peptide
  MOD_RES (8)..(8): phosphorylated serine
KPPYRSHSM

SEQ ID NO: 823 - protein, 9 aa, Artificial Sequence
  Description of Artificial Sequence: Synthetic peptide
  MOD_RES (8)..(8): phosphorylated serine
KPPYRSHSV

SEQ ID NO: 824 - protein, 9 aa, Artificial Sequence
  Description of Artificial Sequence: Synthetic peptide
  MOD_RES (8)..(8): phosphorylated threonine
KPQTRGKTF

SEQ ID NO: 825 - protein, 9 aa, Artificial Sequence
  Description of Artificial Sequence: Synthetic peptide
  MOD_RES (8)..(8): phosphorylated threonine
KPQTRGKTL

SEQ ID NO: 826 - protein, 9 aa, Artificial Sequence
  Description of Artificial Sequence: Synthetic peptide
  MOD_RES (8)..(8): phosphorylated threonine
KPQTRGKTM

SEQ ID NO: 827 - protein, 9 aa, Artificial Sequence
  Description of Artificial Sequence: Synthetic peptide
  MOD_RES (8)..(8): phosphorylated threonine
KPQTRGKTV

SEQ ID NO: 828 - protein, 9 aa, Artificial Sequence
  Description of Artificial Sequence: Synthetic peptide
  MOD_RES (6)..(6): phosphorylated serine
KPRPLSMDL

SEQ ID NO: 829 - protein, 9 aa, Artificial Sequence
  Description of Artificial Sequence: Synthetic peptide
  MOD_RES (8)..(8): phosphorylated serine
KPRPPPLSF

SEQ ID NO: 830 - protein, 9 aa, Artificial Sequence
  Description of Artificial Sequence: Synthetic peptide
  MOD_RES (8)..(8): phosphorylated serine
KPRPPPLSL

SEQ ID NO: 831 - protein, 9 aa, Artificial Sequence
  Description of Artificial Sequence: Synthetic peptide
  MOD_RES (8)..(8): phosphorylated serine
KPRPPPLSM

SEQ ID NO: 832 - protein, 9 aa, Artificial Sequence
  Description of Artificial Sequence: Synthetic peptide
  MOD_RES (8)..(8): phosphorylated serine
KPRPPPLSP

SEQ ID NO: 833 - protein, 9 aa, Artificial Sequence
  Description of Artificial Sequence: Synthetic peptide
  MOD_RES (8)..(8): phosphorylated serine
KPRPPPLSV

SEQ ID NO: 834 - protein, 9 aa, Artificial Sequence
  Description of Artificial Sequence: Synthetic peptide
  MOD_RES (6)..(6): phosphorylated serine
  MOD_RES (8)..(8): phosphorylated serine
KPRRFSRSL

SEQ ID NO: 835 - protein, 9 aa, Artificial Sequence
  Description of Artificial Sequence: Synthetic peptide
  MOD_RES (6)..(6): phosphorylated serine
KPRRFSRSL

SEQ ID NO: 836 - protein, 9 aa, Artificial Sequence
  Description of Artificial Sequence: Synthetic peptide
  MOD_RES (4)..(4): phosphorylated serine
KPRSPDHVF

SEQ ID NO: 837 - protein, 9 aa, Artificial Sequence
  Description of Artificial Sequence: Synthetic peptide
  MOD_RES (4)..(4): phosphorylated serine
KPRSPDHVL

SEQ ID NO: 838 - protein, 9 aa, Artificial Sequence
  Description of Artificial Sequence: Synthetic peptide
  MOD_RES (4)..(4): phosphorylated serine
KPRSPDHVM

SEQ ID NO: 839 - protein, 9 aa, Artificial Sequence
  Description of Artificial Sequence: Synthetic peptide
  MOD_RES (4)..(4): phosphorylated serine
KPRSPDHVV

SEQ ID NO: 840 - protein, 9 aa, Artificial Sequence
  Description of Artificial Sequence: Synthetic peptide
  MOD_RES (4)..(4): phosphorylated serine
KPRSPFSKI

SEQ ID NO: 841 - protein, 9 aa, Artificial Sequence
  Description of Artificial Sequence: Synthetic peptide
  MOD_RES (4)..(4): phosphorylated serine
KPRSPPRAF

SEQ ID NO: 842 - protein, 9 aa, Artificial Sequence
  Description of Artificial Sequence: Synthetic peptide
  MOD_RES (4)..(4): phosphorylated serine
KPRSPPRAL

SEQ ID NO: 843 - protein, 10 aa, Artificial Sequence
  Description of Artificial Sequence: Synthetic peptide
  MOD_RES (4)..(4): phosphorylated serine
KPRSPPRALF

SEQ ID NO: 844 - protein, 10 aa, Artificial Sequence
  Description of Artificial Sequence: Synthetic peptide
  MOD_RES (4)..(4): phosphorylated serine
KPRSPPRALL

SEQ ID NO: 845 - protein, 10 aa, Artificial Sequence
  Description of Artificial Sequence: Synthetic peptide
  MOD_RES (4)..(4): phosphorylated serine
KPRSPPRALM

SEQ ID NO: 846 - protein, 10 aa, Artificial Sequence
  Description of Artificial Sequence: Synthetic peptide
  MOD_RES (4)..(4): phosphorylated serine
KPRSPPRALV

SEQ ID NO: 847 - protein, 11 aa, Artificial Sequence
  Description of Artificial Sequence: Synthetic peptide
  MOD_RES (4)..(4): phosphorylated serine
KPRSPPRALVF

SEQ ID NO: 848 - protein, 11 aa, Artificial Sequence
  Description of Artificial Sequence: Synthetic peptide
  MOD_RES (4)..(4): phosphorylated serine
KPRSPPRALVL

SEQ ID NO: 849 - protein, 12 aa, Artificial Sequence
  Description of Artificial Sequence: Synthetic peptide
  MOD_RES (4)..(4): phosphorylated serine
KPRSPPRALVLF

SEQ ID NO: 850 - protein, 12 aa, Artificial Sequence
  Description of Artificial Sequence: Synthetic peptide
  MOD_RES (4)..(4): phosphorylated serine
KPRSPPRALVLL

SEQ ID NO: 851 - protein, 12 aa, Artificial Sequence
  Description of Artificial Sequence: Synthetic peptide
  MOD_RES (4)..(4): phosphorylated serine
KPRSPPRALVLM

SEQ ID NO: 852 - protein, 12 aa, Artificial Sequence
  Description of Artificial Sequence: Synthetic peptide
  MOD_RES (4)..(4): phosphorylated serine
KPRSPPRALVLP

SEQ ID NO: 853 - protein, 12 aa, Artificial Sequence
  Description of Artificial Sequence: Synthetic peptide
  MOD_RES (4)..(4): phosphorylated serine
KPRSPPRALVLV

SEQ ID NO: 854 - protein, 11 aa, Artificial Sequence
  Description of Artificial Sequence: Synthetic peptide
  MOD_RES (4)..(4): phosphorylated serine
KPRSPPRALVM

SEQ ID NO: 855 - protein, 11 aa, Artificial Sequence
  Description of Artificial Sequence: Synthetic peptide
  MOD_RES (4)..(4): phosphorylated serine
KPRSPPRALVV

SEQ ID NO: 856 - protein, 9 aa, Artificial Sequence
  Description of Artificial Sequence: Synthetic peptide
  MOD_RES (4)..(4): phosphorylated serine
KPRSPPRAM

SEQ ID NO: 857 - protein, 9 aa, Artificial Sequence
  Description of Artificial Sequence: Synthetic peptide
  MOD_RES (4)..(4): phosphorylated serine
KPRSPPRAV

SEQ ID NO: 858 - protein, 9 aa, Artificial Sequence
  Description of Artificial Sequence: Synthetic peptide
  MOD_RES (4)..(4): phosphorylated serine
KPRSPVVEF

SEQ ID NO: 859 - protein, 9 aa, Artificial Sequence
  Description of Artificial Sequence: Synthetic peptide
  MOD_RES (4)..(4): phosphorylated serine
KPRSPVVEL

SEQ ID NO: 860 - protein, 9 aa, Artificial Sequence
  Description of Artificial Sequence: Synthetic peptide
  MOD_RES (4)..(4): phosphorylated serine
KPRSPVVEM

SEQ ID NO: 861 - protein, 9 aa, Artificial Sequence
  Description of Artificial Sequence: Synthetic peptide
  MOD_RES (4)..(4): phosphorylated serine
KPRSPVVEV

SEQ ID NO: 862 - protein, 9 aa, Artificial Sequence
  Description of Artificial Sequence: Synthetic peptide
  MOD_RES (4)..(4): phosphorylated serine
KPSSPRGSL

SEQ ID NO: 863 - protein, 10 aa, Artificial Sequence
  Description of Artificial Sequence: Synthetic peptide
  MOD_RES (4)..(4): phosphorylated serine
KPSSPRGSLL

SEQ ID NO: 864 - protein, 10 aa, Artificial Sequence
  Description of Artificial Sequence: Synthetic peptide
  MOD_RES (4)..(4): phosphorylated serine
KPVSPKSGTL

SEQ ID NO: 865 - protein, 9 aa, Artificial Sequence
  Description of Artificial Sequence: Synthetic peptide
  MOD_RES (4)..(4): phosphorylated serine
KPYSPLASF

SEQ ID NO: 866 - protein, 9 aa, Artificial Sequence
  Description of Artificial Sequence: Synthetic peptide
  MOD_RES (4)..(4): phosphorylated serine
KPYSPLASL

SEQ ID NO: 867 - protein, 9 aa, Artificial Sequence
  Description of Artificial Sequence: Synthetic peptide
  MOD_RES (4)..(4): phosphorylated serine
KPYSPLASM

SEQ ID NO: 868 - protein, 9 aa, Artificial Sequence
  Description of Artificial Sequence: Synthetic peptide
  MOD_RES (4)..(4): phosphorylated serine
KPYSPLASV

SEQ ID NO: 869 - protein, 9 aa, Artificial Sequence
  Description of Artificial Sequence: Synthetic peptide
  MOD_RES (4)..(4): phosphorylated serine
KQDSLVINL

SEQ ID NO: 870 - protein, 9 aa, Artificial Sequence
  Description of Artificial Sequence: Synthetic peptide
  MOD_RES (4)..(4): phosphorylated serine
KRASFAKSF

SEQ ID NO: 871 - protein, 9 aa, Artificial Sequence
  Description of Artificial Sequence: Synthetic peptide
  MOD_RES (4)..(4): phosphorylated serine
KRASFAKSK

SEQ ID NO: 872 - protein, 9 aa, Artificial Sequence
  Description of Artificial Sequence: Synthetic peptide
  MOD_RES (4)..(4): phosphorylated serine
KRASFAKSL

SEQ ID NO: 873 - protein, 9 aa, Artificial Sequence
  Description of Artificial Sequence: Synthetic peptide
  MOD_RES (4)..(4): phosphorylated serine
KRASFAKSM

SEQ ID NO: 874 - protein, 9 aa, Artificial Sequence
  Description of Artificial Sequence: Synthetic peptide
  MOD_RES (4)..(4): phosphorylated serine
KRASFAKSR

SEQ ID NO: 875 - protein, 9 aa, Artificial Sequence
  Description of Artificial Sequence: Synthetic peptide
  MOD_RES (4)..(4): phosphorylated serine
KRASFAKSV

SEQ ID NO: 876 - protein, 9 aa, Artificial Sequence
  Description of Artificial Sequence: Synthetic peptide
  MOD_RES (4)..(4): phosphorylated serine
KRASFAKSY

SEQ ID NO: 877 - protein, 10 aa, Artificial Sequence
  Description of Artificial Sequence: Synthetic peptide
  MOD_RES (4)..(4): phosphorylated serine
KRASGQAFEF

SEQ ID NO: 878 - protein, 10 aa, Artificial Sequence
  Description of Artificial Sequence: Synthetic peptide
  MOD_RES (4)..(4): phosphorylated serine
KRASGQAFEK

SEQ ID NO: 879 - protein, 10 aa, Artificial Sequence
  Description of Artificial Sequence: Synthetic peptide
  MOD_RES (4)..(4): phosphorylated serine
KRASGQAFEL

SEQ ID NO: 880 - protein, 10 aa, Artificial Sequence
  Description of Artificial Sequence: Synthetic peptide
  MOD_RES (4)..(4): phosphorylated serine
KRASGQAFER

SEQ ID NO: 881 - protein, 10 aa, Artificial Sequence
  Description of Artificial Sequence: Synthetic peptide
  MOD_RES (4)..(4): phosphorylated serine
KRASGQAFEY

SEQ ID NO: 882 - protein, 9 aa, Artificial Sequence
  Description of Artificial Sequence: Synthetic peptide
  MOD_RES (5)..(5): phosphorylated serine
KRASSPFRF

SEQ ID NO: 883 - protein, 9 aa, Artificial Sequence
  Description of Artificial Sequence: Synthetic peptide
  MOD_RES (5)..(5): phosphorylated serine
KRASSPFRK

SEQ ID NO: 884 - protein, 9 aa, Artificial Sequence
  Description of Artificial Sequence: Synthetic peptide
  MOD_RES (5)..(5): phosphorylated serine
KRASSPFRL

SEQ ID NO: 885 - protein, 9 aa, Artificial Sequence
  Description of Artificial Sequence: Synthetic peptide
  MOD_RES (5)..(5): phosphorylated serine
KRASSPFRM

SEQ ID NO: 886 - protein, 9 aa, Artificial Sequence
  Description of Artificial Sequence: Synthetic peptide
  MOD_RES (5)..(5): phosphorylated serine
KRASSPFRR

SEQ ID NO: 887 - protein, 9 aa, Artificial Sequence
  Description of Artificial Sequence: Synthetic peptide
  MOD_RES (5)..(5): phosphorylated serine
KRASSPFRY

SEQ ID NO: 888 - protein, 9 aa, Artificial Sequence
  Description of Artificial Sequence: Synthetic peptide
  MOD_RES (4)..(4): phosphorylated serine
KRASVFVKF

SEQ ID NO: 889 - protein, 9 aa, Artificial Sequence
  Description of Artificial Sequence: Synthetic peptide
  MOD_RES (4)..(4): phosphorylated serine
KRASVFVKK

SEQ ID NO: 890 - protein, 9 aa, Artificial Sequence
  Description of Artificial Sequence: Synthetic peptide
  MOD_RES (4)..(4): phosphorylated serine
KRASVFVKL

SEQ ID NO: 891 - protein, 9 aa, Artificial Sequence
  Description of Artificial Sequence: Synthetic peptide
  MOD_RES (4)..(4): phosphorylated serine
KRASVFVKM

SEQ ID NO: 892 - protein, 9 aa, Artificial Sequence
  Description of Artificial Sequence: Synthetic peptide
  MOD_RES (4)..(4): phosphorylated serine
KRASVFVKR

SEQ ID NO: 893 - protein, 9 aa, Artificial Sequence
  Description of Artificial Sequence: Synthetic peptide
  MOD_RES (4)..(4): phosphorylated serine
KRASVFVKY

SEQ ID NO: 894 - protein, 9 aa, Artificial Sequence
  Description of Artificial Sequence: Synthetic peptide
  MOD_RES (4)..(4): phosphorylated serine
KRASYILRL

SEQ ID NO: 895 - protein, 7 aa, Artificial Sequence
  Description of Artificial Sequence: Synthetic peptide
  MOD_RES (4)..(4): phosphorylated serine
KRFSFKF

SEQ ID NO: 896 - protein, 7 aa, Artificial Sequence
  Description of Artificial Sequence: Synthetic peptide
  MOD_RES (4)..(4): phosphorylated serine
KRFSFKK

SEQ ID NO: 897 - protein, 9 aa, Artificial Sequence
  Description of Artificial Sequence: Synthetic peptide
  MOD_RES (4)..(4): phosphorylated serine
  MOD_RES (8)..(8): phosphorylated serine
KRFSFKKSF

SEQ ID NO: 898 - protein, 9 aa, Artificial Sequence
  Description of Artificial Sequence: Synthetic peptide
  MOD_RES (4)..(4): phosphorylated serine
KRFSFKKSF

SEQ ID NO: 899 - protein, 9 aa, Artificial Sequence
  Description of Artificial Sequence: Synthetic peptide
  MOD_RES (4)..(4): phosphorylated serine
KRFSFKKSK

SEQ ID NO: 900 - protein, 9 aa, Artificial Sequence
  Description of Artificial Sequence: Synthetic peptide
  MOD_RES (4)..(4): phosphorylated serine
KRFSFKKSL

SEQ ID NO: 901 - protein, 9 aa, Artificial Sequence
  Description of Artificial Sequence: Synthetic peptide
  MOD_RES (4)..(4): phosphorylated serine
KRFSFKKSM

SEQ ID NO: 902 - protein, 9 aa, Artificial Sequence
  Description of Artificial Sequence: Synthetic peptide
  MOD_RES (4)..(4): phosphorylated serine
KRFSFKKSR

SEQ ID NO: 903 - protein, 9 aa, Artificial Sequence
  Description of Artificial Sequence: Synthetic peptide
  MOD_RES (4)..(4): phosphorylated serine
KRFSFKKSY

SEQ ID NO: 904 - protein, 7 aa, Artificial Sequence
  Description of Artificial Sequence: Synthetic peptide
  MOD_RES (4)..(4): phosphorylated serine
KRFSFKL

SEQ ID NO: 905 - protein, 7 aa, Artificial Sequence
  Description of Artificial Sequence: Synthetic peptide
  MOD_RES (4)..(4): phosphorylated serine
KRFSFKM

SEQ ID NO: 906 - protein, 7 aa, Artificial Sequence
  Description of Artificial Sequence: Synthetic peptide
  MOD_RES (4)..(4): phosphorylated serine
KRFSFKR

SEQ ID NO: 907 - protein, 9 aa, Artificial Sequence
  Description of Artificial Sequence: Synthetic peptide
  MOD_RES (4)..(4): phosphorylated serine
  MOD_RES (7)..(7): phosphorylated serine
KRFSFKSSF

SEQ ID NO: 908 - protein, 7 aa, Artificial Sequence
  Description of Artificial Sequence: Synthetic peptide
  MOD_RES (4)..(4): phosphorylated serine
KRFSFKY

SEQ ID NO: 909 - protein, 9 aa, Artificial Sequence
  Description of Artificial Sequence: Synthetic peptide
  MOD_RES (4)..(4): phosphorylated serine
KRFSGTVRF

SEQ ID NO: 910 - protein, 9 aa, Artificial Sequence
  Description of Artificial Sequence: Synthetic peptide
  MOD_RES (4)..(4): phosphorylated serine
KRFSGTVRK

SEQ ID NO: 911 - protein, 9 aa, Artificial Sequence
  Description of Artificial Sequence: Synthetic peptide
  MOD_RES (4)..(4): phosphorylated serine
KRFSGTVRL

SEQ ID NO: 912 - protein, 9 aa, Artificial Sequence
  Description of Artificial Sequence: Synthetic peptide
  MOD_RES (4)..(4): phosphorylated serine
KRFSGTVRM

SEQ ID NO: 913 - protein, 9 aa, Artificial Sequence
  Description of Artificial Sequence: Synthetic peptide
  MOD_RES (4)..(4): phosphorylated serine
KRFSGTVRR

SEQ ID NO: 914 - protein, 9 aa, Artificial Sequence
  Description of Artificial Sequence: Synthetic peptide
  MOD_RES (4)..(4): phosphorylated serine
KRFSGTVRY

SEQ ID NO: 915 - protein, 10 aa, Artificial Sequence
  Description of Artificial Sequence: Synthetic peptide
  MOD_RES (6)..(6): phosphorylated serine
KRIVISPKPF

SEQ ID NO: 916 - protein, 9 aa, Artificial Sequence
  Description of Artificial Sequence: Synthetic peptide
  MOD_RES (4)..(4): phosphorylated serine
KRKSFTSLY

SEQ ID NO: 917 - protein, 9 aa, Artificial Sequence
  Description of Artificial Sequence: Synthetic peptide
  MOD_RES (6)..(6): phosphorylated serine
KRLEKSPSF

SEQ ID NO: 918 - protein, 9 aa, Artificial Sequence
  Description of Artificial Sequence: Synthetic peptide
  MOD_RES (8)..(8): phosphorylated serine
KRLEKSPSF

SEQ ID NO: 919 - protein, 9 aa, Artificial Sequence
  Description of Artificial Sequence: Synthetic peptide
  MOD_RES (4)..(4): phosphorylated serine
KRLSPAPQF

SEQ ID NO: 920 - protein, 9 aa, Artificial Sequence
  Description of Artificial Sequence: Synthetic peptide
  MOD_RES (4)..(4): phosphorylated serine
KRLSPAPQK

SEQ ID NO: 921 - protein, 9 aa, Artificial Sequence
  Description of Artificial Sequence: Synthetic peptide
  MOD_RES (4)..(4): phosphorylated serine
KRLSPAPQL

SEQ ID NO: 922 - protein, 9 aa, Artificial Sequence
  Description of Artificial Sequence: Synthetic peptide
  MOD_RES (4)..(4): phosphorylated serine
KRLSPAPQM

SEQ ID NO: 923 - protein, 9 aa, Artificial Sequence
  Description of Artificial Sequence: Synthetic peptide
  MOD_RES (4)..(4): phosphorylated serine
KRLSPAPQR

SEQ ID NO: 924 - protein, 9 aa, Artificial Sequence
  Description of Artificial Sequence: Synthetic peptide
  MOD_RES (4)..(4): phosphorylated serine
KRLSPAPQY

SEQ ID NO: 925 - protein, 10 aa, Artificial Sequence
  Description of Artificial Sequence: Synthetic peptide
  MOD_RES (4)..(4): phosphorylated serine
KRLSTSPVRL

SEQ ID NO: 926 - protein, 9 aa, Artificial Sequence
  Description of Artificial Sequence: Synthetic peptide
  MOD_RES (4)..(4): phosphorylated serine
KRLSVERIF

SEQ ID NO: 927 - protein, 9 aa, Artificial Sequence
  Description of Artificial Sequence: Synthetic peptide
  MOD_RES (4)..(4): phosphorylated serine
KRLSVERIK

SEQ ID NO: 928 - protein, 9 aa, Artificial Sequence
  Description of Artificial Sequence: Synthetic peptide
  MOD_RES (4)..(4): phosphorylated serine
KRLSVERIL

SEQ ID NO: 929 - protein, 9 aa, Artificial Sequence
  Description of Artificial Sequence: Synthetic peptide
  MOD_RES (4)..(4): phosphorylated serine
KRLSVERIM

SEQ ID NO: 930 - protein, 9 aa, Artificial Sequence
  Description of Artificial Sequence: Synthetic peptide
  MOD_RES (4)..(4): phosphorylated serine
KRLSVERIR

SEQ ID NO: 931 - protein, 9 aa, Artificial Sequence
  Description of Artificial Sequence: Synthetic peptide
  MOD_RES (4)..(4): phosphorylated serine
KRLSVERIY

SEQ ID NO: 932 - protein, 8 aa, Artificial Sequence
  Description of Artificial Sequence: Synthetic peptide
  MOD_RES (4)..(4): phosphorylated serine
KRMSPKEF

SEQ ID NO: 933 - protein, 8 aa, Artificial Sequence
  Description of Artificial Sequence: Synthetic peptide
  MOD_RES (4)..(4): phosphorylated serine
KRMSPKEK

SEQ ID NO: 934 - protein, 8 aa, Artificial Sequence
  Description of Artificial Sequence: Synthetic peptide
  MOD_RES (4)..(4): phosphorylated serine
KRMSPKEL

SEQ ID NO: 935 - protein, 8 aa, Artificial Sequence
  Description of Artificial Sequence: Synthetic peptide
  MOD_RES (4)..(4): phosphorylated serine
KRMSPKER

SEQ ID NO: 936 - protein, 8 aa, Artificial Sequence
  Description of Artificial Sequence: Synthetic peptide
  MOD_RES (4)..(4): phosphorylated serine
KRMSPKEY

SEQ ID NO: 937 - protein, 9 aa, Artificial Sequence
  Description of Artificial Sequence: Synthetic peptide
  MOD_RES (3)..(3): oxidized methionine
  MOD_RES (4)..(4): phosphorylated serine
KRMSPKPEL

SEQ ID NO: 938 - protein, 9 aa, Artificial Sequence
  Description of Artificial Sequence: Synthetic peptide
  MOD_RES (4)..(4): phosphorylated serine
KRMSPKPEL

SEQ ID NO: 939 - protein, 8 aa, Artificial Sequence
  Description of Artificial Sequence: Synthetic peptide
  MOD_RES (4)..(4): phosphorylated serine
KRMSPKPF

SEQ ID NO: 940 - protein, 8 aa, Artificial Sequence
  Description of Artificial Sequence: Synthetic peptide
  MOD_RES (4)..(4): phosphorylated serine
KRMSPKPK

SEQ ID NO: 941 - protein, 8 aa, Artificial Sequence
  Description of Artificial Sequence: Synthetic peptide
  MOD_RES (4)..(4): phosphorylated serine
KRMSPKPL

SEQ ID NO: 942 - protein, 8 aa, Artificial Sequence
  Description of Artificial Sequence: Synthetic peptide
  MOD_RES (4)..(4): phosphorylated serine
KRMSPKPM

SEQ ID NO: 943 - protein, 8 aa, Artificial Sequence
  Description of Artificial Sequence: Synthetic peptide
  MOD_RES (4)..(4): phosphorylated serine
KRMSPKPR

SEQ ID NO: 944 - protein, 8 aa, Artificial Sequence
  Description of Artificial Sequence: Synthetic peptide
  MOD_RES (4)..(4): phosphorylated serine
KRMSPKPY

SEQ ID NO: 945 - protein, 9 aa, Artificial Sequence
  Description of Artificial Sequence: Synthetic peptide
  MOD_RES (5)..(5): phosphorylated serine
KRPESPPSI

SEQ ID NO: 946 - protein, 9 aa, Artificial Sequence
  Description of Artificial Sequence: Synthetic peptide
  MOD_RES (5)..(5): phosphorylated serine
KRWQSPVTK

SEQ ID NO: 947 - protein, 9 aa, Artificial Sequence
  Description of Artificial Sequence: Synthetic peptide
  MOD_RES (4)..(4): phosphorylated serine
KRYSEPVSL

SEQ ID NO: 948 - protein, 9 aa, Artificial Sequence
  Description of Artificial Sequence: Synthetic peptide
  MOD_RES (4)..(4): phosphorylated serine
KRYSGNMEF

SEQ ID NO: 949 - protein, 9 aa, Artificial Sequence
  Description of Artificial Sequence: Synthetic peptide
  MOD_RES (4)..(4): phosphorylated serine
KRYSGNMEK

SEQ ID NO: 950 - protein, 9 aa, Artificial Sequence
  Description of Artificial Sequence: Synthetic peptide
  MOD_RES (4)..(4): phosphorylated serine
KRYSGNMEL

SEQ ID NO: 951 - protein, 9 aa, Artificial Sequence
  Description of Artificial Sequence: Synthetic peptide
  MOD_RES (4)..(4): phosphorylated serine
KRYSGNMEM

SEQ ID NO: 952 - protein, 9 aa, Artificial Sequence
  Description of Artificial Sequence: Synthetic peptide
  MOD_RES (4)..(4): phosphorylated serine
KRYSGNMER

SEQ ID NO: 953 - protein, 9 aa, Artificial Sequence
  Description of Artificial Sequence: Synthetic peptide
  MOD_RES (4)..(4): phosphorylated serine
  MOD_RES (7)..(7): oxidized methionine
KRYSGNMEY

SEQ ID NO: 954 - protein, 9 aa, Artificial Sequence
  Description of Artificial Sequence: Synthetic peptide
  MOD_RES (4)..(4): phosphorylated serine
KRYSGNMEY

SEQ ID NO: 955 - protein, 9 aa, Artificial Sequence
  Description of Artificial Sequence: Synthetic peptide
  MOD_RES (4)..(4): phosphorylated serine
KRYSRALYL

SEQ ID NO: 956 - protein, 9 aa, Artificial Sequence
  Description of Artificial Sequence: Synthetic peptide
  MOD_RES (4)..(4): phosphorylated serine
KSDSRQERY

SEQ ID NO: 957 - protein, 9 aa, Artificial Sequence
  Description of Artificial Sequence: Synthetic peptide
  MOD_RES (4)..(4): phosphorylated serine
KSESRQERY

SEQ ID NO: 958 - protein, 9 aa, Artificial Sequence
  Description of Artificial Sequence: Synthetic peptide
  MOD_RES (8)..(8): phosphorylated threonine
KSGELLATW

SEQ ID NO: 959 - protein, 11 aa, Artificial Sequence
  Description of Artificial Sequence: Synthetic peptide
  MOD_RES (4)..(4): phosphorylated serine
KSKSNPDFLKK

SEQ ID NO: 960 - protein, 10 aa, Artificial Sequence
  Description of Artificial Sequence: Synthetic peptide
  MOD_RES (4)..(4): phosphorylated serine
KSKSNPFLKK

SEQ ID NO: 961 - protein, 9 aa, Artificial Sequence
  Description of Artificial Sequence: Synthetic peptide
  MOD_RES (4)..(4): phosphorylated threonine
KSKTPLVAK

SEQ ID NO: 962 - protein, 9 aa, Artificial Sequence
  Description of Artificial Sequence: Synthetic peptide
  MOD_RES (4)..(4): phosphorylated threonine
KSKTPLVAR

SEQ ID NO: 963 - protein, 9 aa, Artificial Sequence
  Description of Artificial Sequence: Synthetic peptide
  MOD_RES (4)..(4): phosphorylated threonine
KSKTPLVAY

SEQ ID NO: 964 - protein, 9 aa, Artificial Sequence
  Description of Artificial Sequence: Synthetic peptide
  MOD_RES (2)..(2): phosphorylated serine
KSLVRLLLL

SEQ ID NO: 965 - protein, 10 aa, Artificial Sequence
  Description of Artificial Sequence: Synthetic peptide
  MOD_RES (4)..(4): phosphorylated serine
KSSSLGNLKK

SEQ ID NO: 966 - protein, 14 aa, Artificial Sequence
  Description of Artificial Sequence: Synthetic peptide
  MOD_RES (2)..(2): phosphorylated serine
KSVKALSSLHGDDQ

SEQ ID NO: 967 - protein, 15 aa, Artificial Sequence
  Description of Artificial Sequence: Synthetic peptide
  MOD_RES (2)..(2): phosphorylated serine
KSVKALSSLHGDDQD

SEQ ID NO: 968 - protein, 19 aa, Artificial Sequence
  Description of Artificial Sequence: Synthetic peptide
  MOD_RES (2)..(2): phosphorylated serine
  MOD_RES (16)..(16): phosphorylated serine
KSVKALSSLHGDDQDSEDE

SEQ ID NO: 969 - protein, 19 aa, Artificial Sequence
  Description of Artificial Sequence: Synthetic peptide
  MOD_RES (16)..(16): phosphorylated serine
KSVKALSSLHGDDQDSEDE

SEQ ID NO: 970 - protein, 9 aa, Artificial Sequence
  Description of Artificial Sequence: Synthetic peptide
  MOD_RES (4)..(4): phosphorylated serine
KTDSRQERY

SEQ ID NO: 971 - protein, 9 aa, Artificial Sequence
  Description of Artificial Sequence: Synthetic peptide
  MOD_RES (4)..(4): phosphorylated serine
KTESRQERY

SEQ ID NO: 972 - protein, 12 aa, Artificial Sequence
  Description of Artificial Sequence: Synthetic peptide
  MOD_RES (2)..(2): phosphorylated threonine
KTLSPGKNGVVK

SEQ ID NO: 973 - protein, 12 aa, Artificial Sequence
  Description of Artificial Sequence: Synthetic peptide
  MOD_RES (2)..(2): phosphorylated threonine
KTLSPGKNGVVY

SEQ ID NO: 974 - protein, 9 aa, Artificial Sequence
  Description of Artificial Sequence: Synthetic peptide
  MOD_RES (4)..(4): phosphorylated serine
KTMSGTFLL

SEQ ID NO: 975 - protein, 10 aa, Artificial Sequence
  Description of Artificial Sequence: Synthetic peptide
  MOD_RES (4)..(4): phosphorylated serine
KTMSPSQMIM

SEQ ID NO: 976 - protein, 10 aa, Artificial Sequence
  Description of Artificial Sequence: Synthetic peptide
  MOD_RES (5)..(5): phosphorylated serine
KTPTSPLKMK

SEQ ID NO: 977 - protein, 10 aa, Artificial Sequence
  Description of Artificial Sequence: Synthetic peptide
  MOD_RES (5)..(5): phosphorylated serine
KTPTSPLKMY

SEQ ID NO: 978 - protein, 9 aa, Artificial Sequence
  Description of Artificial Sequence: Synthetic peptide
  MOD_RES (6)..(6): phosphorylated serine
KTWKGSIGL

SEQ ID NO: 979 - protein, 9 aa, Artificial Sequence
  Description of Artificial Sequence: Synthetic peptide
  MOD_RES (4)..(4): phosphorylated serine
KVASLLHQV

SEQ ID NO: 980 - protein, 8 aa, Artificial Sequence
  Description of Artificial Sequence: Synthetic peptide
  MOD_RES (4)..(4): phosphorylated serine
KVDSPVIF

SEQ ID NO: 981 - protein, 11 aa, Artificial Sequence
  Description of Artificial Sequence: Synthetic peptide
  MOD_RES (5)..(5): phosphorylated serine
KVHGSLARAGK

SEQ ID NO: 982 - protein, 11 aa, Artificial Sequence
  Description of Artificial Sequence: Synthetic peptide
  MOD_RES (5)..(5): phosphorylated serine
KVHGSLARAGY

SEQ ID NO: 983 - protein, 11 aa, Artificial Sequence
  Description of Artificial Sequence: Synthetic peptide
  MOD_RES (5)..(5): phosphorylated serine
KVKSSPLIEKK

SEQ ID NO: 984 - protein, 11 aa, Artificial Sequence
  Description of Artificial Sequence: Synthetic peptide
  MOD_RES (4)..(4): phosphorylated serine
KVKSSPLIEKL

SEQ ID NO: 985 - protein, 11 aa, Artificial Sequence
  Description of Artificial Sequence: Synthetic peptide
  MOD_RES (5)..(5): phosphorylated serine
KVKSSPLIEKL

SEQ ID NO: 986 - protein, 11 aa, Artificial Sequence
  Description of Artificial Sequence: Synthetic peptide
  MOD_RES (5)..(5): phosphorylated serine
KVKSSPLIEKY

SEQ ID NO: 987 - protein, 9 aa, Artificial Sequence
  Description of Artificial Sequence: Synthetic peptide
  MOD_RES (4)..(4): phosphorylated serine
KVLSKEFHL

SEQ ID NO: 988 - protein, 9 aa, Artificial Sequence
  Description of Artificial Sequence: Synthetic peptide
  MOD_RES (6)..(6): phosphorylated threonine
KVLSPTAAK

SEQ ID NO: 989 - protein, 9 aa, Artificial Sequence
  Description of Artificial Sequence: Synthetic peptide
  MOD_RES (4)..(4): phosphorylated serine
KVLSSLVTL

SEQ ID NO: 990 - protein, 10 aa, Artificial Sequence
  Description of Artificial Sequence: Synthetic peptide
  MOD_RES (4)..(4): phosphorylated serine
KVLSTEEMEL

SEQ ID NO: 991 - protein, 10 aa, Artificial Sequence
  Description of Artificial Sequence: Synthetic peptide
  MOD_RES (5)..(5): phosphorylated threonine
KVLSTEEMEL

SEQ ID NO: 992 - protein, 9 aa, Artificial Sequence
  Description of Artificial Sequence: Synthetic peptide
  MOD_RES (4)..(4): phosphorylated threonine
KVLTPIKEK

SEQ ID NO: 993 - protein, 9 aa, Artificial Sequence
  Description of Artificial Sequence: Synthetic peptide
  MOD_RES (4)..(4): phosphorylated threonine
KVLTPIKEK

SEQ ID NO: 994 - protein, 9 aa, Artificial Sequence
  Description of Artificial Sequence: Synthetic peptide
  MOD_RES (4)..(4): phosphorylated threonine
KVLTPIKEY

SEQ ID NO: 995 - protein, 10 aa, Artificial Sequence
  Description of Artificial Sequence: Synthetic peptide
  MOD_RES (5)..(5): phosphorylated serine
KVPDSPALAK

SEQ ID NO: 996 - protein, 11 aa, Artificial Sequence
  Description of Artificial Sequence: Synthetic peptide
  MOD_RES (5)..(5): phosphorylated serine
KVPDSPALAKK

SEQ ID NO: 997 - protein, 11 aa, Artificial Sequence
  Description of Artificial Sequence: Synthetic peptide
  MOD_RES (5)..(5): phosphorylated serine
KVPDSPALAKY

SEQ ID NO: 998 - protein, 10 aa, Artificial Sequence
  Description of Artificial Sequence: Synthetic peptide
  MOD_RES (5)..(5): phosphorylated serine
KVPDSPALAY

SEQ ID NO: 999 - protein, 10 aa, Artificial Sequence
  Description of Artificial Sequence: Synthetic peptide
  MOD_RES (5)..(5): phosphorylated serine
KVPTSPLKMY

SEQ ID NO: 1000 - protein, 9 aa, Artificial Sequence
  Description of Artificial Sequence: Synthetic peptide
  MOD_RES (4)..(4): phosphorylated serine
KVQSLRRAL

SEQ ID NO: 1001 - protein, 9 aa, Artificial Sequence
  Description of Artificial Sequence: Synthetic peptide
  MOD_RES (5)..(5): phosphorylated threonine
KVQVTSLSV

SEQ ID NO: 1002 - protein, 9 aa, Artificial Sequence
  Description of Artificial Sequence: Synthetic peptide
  MOD_RES (4)..(4): phosphorylated serine
KVYSSSEFL

SEQ ID NO: 1003 - protein, 9 aa, Artificial Sequence
  Description of Artificial Sequence: Synthetic peptide
  MOD_RES (4)..(4): phosphorylated serine
KYISGPHEL

SEQ ID NO: 1004 - protein, 10 aa, Artificial Sequence
  Description of Artificial Sequence: Synthetic peptide
  MOD_RES (3)..(3): phosphorylated serine
KYSPGKLRGN

SEQ ID NO: 1005 - protein, 25 aa, Artificial Sequence
  Description of Artificial Sequence: Synthetic peptide
  MOD_RES (18)..(18): phosphorylated serine
LGGGGAGLSGRASGGAQSPLRYLHV

SEQ ID NO: 1006 - protein, 9 aa, Artificial Sequence
  Description of Artificial Sequence: Synthetic peptide
  MOD_RES (4)..(4): phosphorylated serine
LKLSYLTWV

SEQ ID NO: 1007 - protein, 10 aa, Artificial Sequence
  Description of Artificial Sequence: Synthetic peptide
  MOD_RES (4)..(4): phosphorylated serine
LLASPGHISV

SEQ ID NO: 1008 - protein, 10 aa, Artificial Sequence
  Description of Artificial Sequence: Synthetic peptide
  MOD_RES (9)..(9): phosphorylated serine
LLDPSRSYSY

SEQ ID NO: 1009 - protein, 10 aa, Artificial Sequence
  Description of Artificial Sequence: Synthetic peptide
  MOD_RES (4)..(4): phosphorylated threonine
LLDTPVKTQY

SEQ ID NO: 1010 - protein, 9 aa, Artificial Sequence
  Description of Artificial Sequence: Synthetic peptide
  MOD_RES (4)..(4): phosphorylated serine
LLFSPVTSL

SEQ ID NO: 1011 - protein, 9 aa, Artificial Sequence
  Description of Artificial Sequence: Synthetic peptide
  MOD_RES (4)..(4): phosphorylated serine
LLFSPVTSV

SEQ ID NO: 1012 - protein, 9 aa, Artificial Sequence
  Description of Artificial Sequence: Synthetic peptide
  MOD_RES (4)..(4): phosphorylated serine
LLLSEEVEL

SEQ ID NO: 1013 - protein, 9 aa, Artificial Sequence
  Description of Artificial Sequence: Synthetic peptide
  MOD_RES (6)..(6): phosphorylated serine
LLNKSSPVK

SEQ ID NO: 1014 - protein, 10 aa, Artificial Sequence
  Description of Artificial Sequence: Synthetic peptide
  MOD_RES (6)..(6): phosphorylated serine
LLNKSSPVKK

SEQ ID NO: 1015 - protein, 10 aa, Artificial Sequence
  Description of Artificial Sequence: Synthetic peptide
  MOD_RES (6)..(6): phosphorylated serine
LLNKSSPVKY

SEQ ID NO: 1016 - protein, 9 aa, Artificial Sequence
  Description of Artificial Sequence: Synthetic peptide
  MOD_RES (4)..(4): phosphorylated serine
LMFSPVTSL

SEQ ID NO: 1017 - protein, 9 aa, Artificial Sequence
  Description of Artificial Sequence: Synthetic peptide
  MOD_RES (4)..(4): phosphorylated serine
LMFSPVTSV

SEQ ID NO: 1018 - protein, 8 aa, Artificial Sequence
  Description of Artificial Sequence: Synthetic peptide
  MOD_RES (4)..(4): phosphorylated serine
LMFSVTSI

SEQ ID NO: 1019 - protein, 8 aa, Artificial Sequence
  Description of Artificial Sequence: Synthetic peptide
  MOD_RES (4)..(4): phosphorylated serine
LMFSVTSL

SEQ ID NO: 1020 - protein, 9 aa, Artificial Sequence
  Description of Artificial Sequence: Synthetic peptide
  MOD_RES (6)..(6): phosphorylated serine
LMNKSSPVK

SEQ ID NO: 1021 - protein, 10 aa, Artificial Sequence
  Description of Artificial Sequence: Synthetic peptide
  MOD_RES (6)..(6): phosphorylated serine
LMNKSSPVKK

SEQ ID NO: 1022 - protein, 10 aa, Artificial Sequence
  Description of Artificial Sequence: Synthetic peptide
  MOD_RES (6)..(6): phosphorylated serine
LMNKSSPVKY

SEQ ID NO: 1023 - protein, 8 aa, Artificial Sequence
  Description of Artificial Sequence: Synthetic peptide
  MOD_RES (4)..(4): phosphorylated serine
LPASPHQF

SEQ ID NO: 1024 - protein, 8 aa, Artificial Sequence
  Description of Artificial Sequence: Synthetic peptide
  MOD_RES (4)..(4): phosphorylated serine
LPASPHQL

SEQ ID NO: 1025 - protein, 8 aa, Artificial Sequence
  Description of Artificial Sequence: Synthetic peptide
  MOD_RES (4)..(4): phosphorylated serine
LPASPHQM

SEQ ID NO: 1026 - protein, 8 aa, Artificial Sequence
  Description of Artificial Sequence: Synthetic peptide
  MOD_RES (4)..(4): phosphorylated serine
LPASPHQV

SEQ ID NO: 1027 - protein, 9 aa, Artificial Sequence
  Description of Artificial Sequence: Synthetic peptide
  MOD_RES (4)..(4): phosphorylated serine
LPASPRARF

SEQ ID NO: 1028 - protein, 9 aa, Artificial Sequence
  Description of Artificial Sequence: Synthetic peptide
  MOD_RES (4)..(4): phosphorylated serine
LPASPRARL

SEQ ID NO: 1029 - protein, 9 aa, Artificial Sequence
  Description of Artificial Sequence: Synthetic peptide
  MOD_RES (4)..(4): phosphorylated serine
LPASPRARM

SEQ ID NO: 1030 - protein, 9 aa, Artificial Sequence
  Description of Artificial Sequence: Synthetic peptide
  MOD_RES (4)..(4): phosphorylated serine
LPASPRARV

SEQ ID NO: 1031 - protein, 9 aa, Artificial Sequence
  Description of Artificial Sequence: Synthetic peptide
  MOD_RES (8)..(8): phosphorylated serine
LPIFSRLSF

SEQ ID NO: 1032 - protein, 9 aa, Artificial Sequence
  Description of Artificial Sequence: Synthetic peptide
  MOD_RES (8)..(8): phosphorylated serine
LPIFSRLSI

SEQ ID NO: 1033 - protein, 9 aa, Artificial Sequence
  Description of Artificial Sequence: Synthetic peptide
  MOD_RES (8)..(8): phosphorylated serine
LPIFSRLSL

SEQ ID NO: 1034 - protein, 9 aa, Artificial Sequence
  Description of Artificial Sequence: Synthetic peptide
  MOD_RES (8)..(8): phosphorylated serine
LPIFSRLSM

SEQ ID NO: 1035 - protein, 9 aa, Artificial Sequence
  Description of Artificial Sequence: Synthetic peptide
  MOD_RES (8)..(8): phosphorylated serine
LPIFSRLSV

SEQ ID NO: 1036 - protein, 9 aa, Artificial Sequence
  Description of Artificial Sequence: Synthetic peptide
  MOD_RES (6)..(6): phosphorylated serine
LPKGLSASL

SEQ ID NO: 1037 - protein, 9 aa, Artificial Sequence
  Description of Artificial Sequence: Synthetic peptide
  MOD_RES (8)..(8): phosphorylated serine
LPKGLSASL

SEQ ID NO: 1038 - protein, 10 aa, Artificial Sequence
  Description of Artificial Sequence: Synthetic peptide
  MOD_RES (4)..(4): phosphorylated serine
LPKSPPYTAF

SEQ ID NO: 1039 - protein, 10 aa, Artificial Sequence
  Description of Artificial Sequence: Synthetic peptide
  MOD_RES (4)..(4): phosphorylated serine
LPKSPPYTAL

SEQ ID NO: 1040 - protein, 10 aa, Artificial Sequence
  Description of Artificial Sequence: Synthetic peptide
  MOD_RES (4)..(4): phosphorylated serine
LPKSPPYTAM

SEQ ID NO: 1041 - protein, 10 aa, Artificial Sequence
  Description of Artificial Sequence: Synthetic peptide
  MOD_RES (4)..(4): phosphorylated serine
LPKSPPYTAV

SEQ ID NO: 1042 - protein, 10 aa, Artificial Sequence
  Description of Artificial Sequence: Synthetic peptide
  MOD_RES (6)..(6): phosphorylated serine
LPRGSSPSVF

SEQ ID NO: 1043 - protein, 10 aa, Artificial Sequence
  Description of Artificial Sequence: Synthetic peptide
  MOD_RES (5)..(5): phosphorylated serine
LPRGSSPSVL

SEQ ID NO: 1044 - protein, 10 aa, Artificial Sequence
  Description of Artificial Sequence: Synthetic peptide
  MOD_RES (6)..(6): phosphorylated serine
LPRGSSPSVL

SEQ ID NO: 1045 - protein, 10 aa, Artificial Sequence
  Description of Artificial Sequence: Synthetic peptide
  MOD_RES (6)..(6): phosphorylated serine
LPRGSSPSVM

SEQ ID NO: 1046 - protein, 10 aa, Artificial Sequence
  Description of Artificial Sequence: Synthetic peptide
  MOD_RES (6)..(6): phosphorylated serine
LPRGSSPSVV

SEQ ID NO: 1047 - protein, 10 aa, Artificial Sequence
  Description of Artificial Sequence: Synthetic peptide
  MOD_RES (4)..(4): oxidized methionine
  MOD_RES (6)..(6): phosphorylated serine
LPRMISHSEL

SEQ ID NO: 1048 - protein, 10 aa, Artificial Sequence
  Description of Artificial Sequence: Synthetic peptide
  MOD_RES (6)..(6): phosphorylated serine
LPRMISHSEL

SEQ ID NO: 1049 - protein, 9 aa, Artificial Sequence
  Description of Artificial Sequence: Synthetic peptide
  MOD_RES (6)..(6): phosphorylated serine
LPRPASPAL

SEQ ID NO: 1050 - protein, 9 aa, Artificial Sequence
  Description of Artificial Sequence: Synthetic peptide
  MOD_RES (6)..(6): phosphorylated serine
LPRSSSMAA

SEQ ID NO: 1051 - protein, 11 aa, Artificial Sequence
  Description of Artificial Sequence: Synthetic peptide
  MOD_RES (6)..(6): phosphorylated serine
LPRSSSMAAGL

SEQ ID NO: 1052 - protein, 9 aa, Artificial Sequence
  Description of Artificial Sequence: Synthetic peptide
  MOD_RES (4)..(4): phosphorylated threonine
LPRTPRPEL

SEQ ID NO: 1053 - protein, 9 aa, Artificial Sequence
  Description of Artificial Sequence: Synthetic peptide
  MOD_RES (4)..(4): phosphorylated serine
LPVSPRLQL

SEQ ID NO: 1054 - protein, 11 aa, Artificial Sequence
  Description of Artificial Sequence: Synthetic peptide
  MOD_RES (4)..(4): phosphorylated serine
LQLSPLKGLSL

SEQ ID NO: 1055 - protein, 9 aa, Artificial Sequence
  Description of Artificial Sequence: Synthetic peptide
  MOD_RES (5)..(5): phosphorylated threonine
LQNITENQL

SEQ ID NO: 1056 - protein, 10 aa, Artificial Sequence
  Description of Artificial Sequence: Synthetic peptide
  MOD_RES (9)..(9): phosphorylated serine
LSDPSRSYSY

SEQ ID NO: 1057 - protein, 10 aa, Artificial Sequence
  Description of Artificial Sequence: Synthetic peptide
  MOD_RES (4)..(4): phosphorylated serine
LSDSDTEAKL

SEQ ID NO: 1058 - protein, 10 aa, Artificial Sequence
  Description of Artificial Sequence: Synthetic peptide
  MOD_RES (4)..(4): phosphorylated serine
LSDSDTEAKY

SEQ ID NO: 1059 - protein, 10 aa, Artificial Sequence
  Description of Artificial Sequence: Synthetic peptide
  MOD_RES (4)..(4): phosphorylated threonine
LSDTPVKTQY

SEQ ID NO: 1060 - protein, 10 aa, Artificial Sequence
  Description of Artificial Sequence: Synthetic peptide
  MOD_RES (9)..(9): phosphorylated serine
LSEPSRSYSY

SEQ ID NO: 1061 - protein, 10 aa, Artificial Sequence
  Description of Artificial Sequence: Synthetic peptide
  MOD_RES (4)..(4): phosphorylated serine
LSESDTEAKL

SEQ ID NO: 1062 - protein, 10 aa, Artificial Sequence
  Description of Artificial Sequence: Synthetic peptide
  MOD_RES (4)..(4): phosphorylated serine
LSESDTEAKY

SEQ ID NO: 1063 - protein, 10 aa, Artificial Sequence
  Description of Artificial Sequence: Synthetic peptide
  MOD_RES (4)..(4): phosphorylated threonine
LSETPVKTQY

SEQ ID NO: 1064 - protein, 18 aa, Artificial Sequence
  Description of Artificial Sequence: Synthetic peptide
  MOD_RES (15)..(15): phosphorylated serine
LSKFRMPQPSSGRESPRH

SEQ ID NO: 1065 - protein, 9 aa, Artificial Sequence
  Description of Artificial Sequence: Synthetic peptide
  MOD_RES (4)..(4): phosphorylated serine
LSSSVIREL

SEQ ID NO: 1066 - protein, 10 aa, Artificial Sequence
  Description of Artificial Sequence: Synthetic peptide
  MOD_RES (9)..(9): phosphorylated serine
LTDPSRSYSY

SEQ ID NO: 1067 - protein, 12 aa, Artificial Sequence
  Description of Artificial Sequence: Synthetic peptide
  MOD_RES (6)..(6): phosphorylated serine
LTDPSSPTISSY

SEQ ID NO: 1068 - protein, 10 aa, Artificial Sequence
  Description of Artificial Sequence: Synthetic peptide
  MOD_RES (4)..(4): phosphorylated serine
LTDSDTEAKL

SEQ ID NO: 1069 - protein, 10 aa, Artificial Sequence
  Description of Artificial Sequence: Synthetic peptide
  MOD_RES (4)..(4): phosphorylated serine
LTDSDTEAKY

SEQ ID NO: 1070 - protein, 10 aa, Artificial Sequence
  Description of Artificial Sequence: Synthetic peptide
  MOD_RES (4)..(4): phosphorylated threonine
LTDTPVKTQY

SEQ ID NO: 1071 - protein, 10 aa, Artificial Sequence
  Description of Artificial Sequence: Synthetic peptide
  MOD_RES (9)..(9): phosphorylated serine
LTEPSRSYSY

SEQ ID NO: 1072 - protein, 10 aa, Artificial Sequence
  Description of Artificial Sequence: Synthetic peptide
  MOD_RES (4)..(4): phosphorylated serine
LTESDTEAKL

SEQ ID NO: 1073 - protein, 10 aa, Artificial Sequence
  Description of Artificial Sequence: Synthetic peptide
  MOD_RES (4)..(4): phosphorylated serine
LTESDTEAKY

SEQ ID NO: 1074 - protein, 10 aa, Artificial Sequence
  Description of Artificial Sequence: Synthetic peptide
  MOD_RES (4)..(4): phosphorylated threonine
LTETPVKTQY

SEQ ID NO: 1075 - protein, 10 aa, Artificial Sequence
  Description of Artificial Sequence: Synthetic peptide
  MOD_RES (4)..(4): phosphorylated threonine
LTETPVKTQY

SEQ ID NO: 1076 - protein, 11 aa, Artificial Sequence
  Description of Artificial Sequence: Synthetic peptide
  MOD_RES (5)..(5): phosphorylated serine
MLAESPSVPRL

SEQ ID NO: 1077 - protein, 11 aa, Artificial Sequence
  Description of Artificial Sequence: Synthetic peptide
  MOD_RES (5)..(5): phosphorylated serine
MLAESPSVPRV

SEQ ID NO: 1078 - protein, 10 aa, Artificial Sequence
  Description of Artificial Sequence: Synthetic peptide
  MOD_RES (4)..(4): phosphorylated serine
MLRSPPRVSK

SEQ ID NO: 1079 - protein, 10 aa, Artificial Sequence
  Description of Artificial Sequence: Synthetic peptide
  MOD_RES (4)..(4): phosphorylated serine
MMRSPPRVSK

SEQ ID NO: 1080 - protein, 17 aa, Artificial Sequence
  Description of Artificial Sequence: Synthetic peptide
  MOD_RES (5)..(5): phosphorylated serine
MPRPSIKKAQNSQAARQ

SEQ ID NO: 1081 - protein, 10 aa, Artificial Sequence
  Description of Artificial Sequence: Synthetic peptide
  MOD_RES (6)..(6): phosphorylated serine
MPRQPSAIRM

SEQ ID NO: 1082 - protein, 10 aa, Artificial Sequence
  Description of Artificial Sequence: Synthetic peptide
  MOD_RES (6)..(6): phosphorylated serine
MPRQPSATRF

SEQ ID NO: 1083 - protein, 10 aa, Artificial Sequence
  Description of Artificial Sequence: Synthetic peptide
  MOD_RES (6)..(6): phosphorylated serine
MPRQPSATRL

SEQ ID NO: 1084 - protein, 10 aa, Artificial Sequence
  Description of Artificial Sequence: Synthetic peptide
  MOD_RES (6)..(6): phosphorylated serine
MPRQPSATRM

SEQ ID NO: 1085 - protein, 10 aa, Artificial Sequence
  Description of Artificial Sequence: Synthetic peptide
  MOD_RES (6)..(6): phosphorylated serine
MPRQPSATRV

SEQ ID NO: 1086 - protein, 9 aa, Artificial Sequence
  Description of Artificial Sequence: Synthetic peptide
  MOD_RES (4)..(4): phosphorylated serine
MRLSEWLQL

SEQ ID NO: 1087 - protein, 9 aa, Artificial Sequence
  Description of Artificial Sequence: Synthetic peptide
  MOD_RES (4)..(4): phosphorylated serine
MRLSRELQF

SEQ ID NO: 1088 - protein, 9 aa, Artificial Sequence
  Description of Artificial Sequence: Synthetic peptide
  MOD_RES (4)..(4): phosphorylated serine
MRLSRELQK

SEQ ID NO: 1089 - protein, 9 aa, Artificial Sequence
  Description of Artificial Sequence: Synthetic peptide
  MOD_RES (4)..(4): phosphorylated serine
MRLSRELQL

SEQ ID NO: 1090 - protein, 9 aa, Artificial Sequence
  Description of Artificial Sequence: Synthetic peptide
  MOD_RES (4)..(4): phosphorylated serine
MRLSRELQM

SEQ ID NO: 1091 - protein, 9 aa, Artificial Sequence
  Description of Artificial Sequence: Synthetic peptide
  MOD_RES (4)..(4): phosphorylated serine
MRLSRELQR

SEQ ID NO: 1092 - protein, 9 aa, Artificial Sequence
  Description of Artificial Sequence: Synthetic peptide
  MOD_RES (4)..(4): phosphorylated serine
MRLSRELQY

SEQ ID NO: 1093 - protein, 9 aa, Artificial Sequence
  Description of Artificial Sequence: Synthetic peptide
  MOD_RES (4)..(4): phosphorylated threonine
MSDTYRLKY

SEQ ID NO: 1094 - protein, 9 aa, Artificial Sequence
  Description of Artificial Sequence: Synthetic peptide
  MOD_RES (4)..(4): phosphorylated threonine
MSETYRLKY

SEQ ID NO: 1095 - protein, 9 aa, Artificial Sequence
  Description of Artificial Sequence: Synthetic peptide
  MOD_RES (4)..(4): phosphorylated threonine
MTDTYRLKY

SEQ ID NO: 1096 - protein, 9 aa, Artificial Sequence
  Description of Artificial Sequence: Synthetic peptide
  MOD_RES (4)..(4): phosphorylated threonine
MTETYRLKY

SEQ ID NO: 1097 - protein, 10 aa, Artificial Sequence
  Description of Artificial Sequence: Synthetic peptide
  MOD_RES (4)..(4): phosphorylated serine
MTRSPPRVSK

SEQ ID NO: 1098 - protein, 10 aa, Artificial Sequence
  Description of Artificial Sequence: Synthetic peptide
  MOD_RES (4)..(4): phosphorylated serine
MTRSPPRVSY

SEQ ID NO: 1099 - protein, 12 aa, Artificial Sequence
  Description of Artificial Sequence: Synthetic peptide
  MOD_RES (10)..(10): phosphorylated serine
NAPPAYEKLSAE

SEQ ID NO: 1100 - protein, 10 aa, Artificial Sequence
  Description of Artificial Sequence: Synthetic peptide
  MOD_RES (4)..(4): phosphorylated serine
NFKSPVKTIR

SEQ ID NO: 1101 - protein, 21 aa, Artificial Sequence
  Description of Artificial Sequence: Synthetic peptide
  MOD_RES (18)..(18): phosphorylated serine
NLELSKFRMPQPSSGRESPRH

SEQ ID NO: 1102 - protein, 11 aa, Artificial Sequence
  Description of Artificial Sequence: Synthetic peptide
  MOD_RES (4)..(4): phosphorylated serine
NLGSRNHVHQL

SEQ ID NO: 1103 - protein, 12 aa, Artificial Sequence
  Description of Artificial Sequence: Synthetic peptide
  MOD_RES (4)..(4): phosphorylated serine
NLLSPDGKMISV

SEQ ID NO: 1104 - protein, 9 aa, Artificial Sequence
  Description of Artificial Sequence: Synthetic peptide
  MOD_RES (8)..(8): phosphorylated serine
NLVERKNSK

SEQ ID NO: 1105 - protein, 9 aa, Artificial Sequence
  Description of Artificial Sequence: Synthetic peptide
  MOD_RES (8)..(8): phosphorylated serine
NLVERKNSL

SEQ ID NO: 1106 - protein, 9 aa, Artificial Sequence
  Description of Artificial Sequence: Synthetic peptide
  MOD_RES (4)..(4): phosphorylated serine
NMDSPGPML

SEQ ID NO: 1107 - protein, 9 aa, Artificial Sequence
  Description of Artificial Sequence: Synthetic peptide
  MOD_RES (8)..(8): phosphorylated serine
NMVERKNSK

SEQ ID NO: 1108 - protein, 9 aa, Artificial Sequence
  Description of Artificial Sequence: Synthetic peptide
  MOD_RES (8)..(8): phosphorylated serine
NMVERKNSL

SEQ ID NO: 1109 - protein, 13 aa, Artificial Sequence
  Description of Artificial Sequence: Synthetic peptide
  MOD_RES (8)..(8): phosphorylated serine
NRAMRRVSSVPSR

SEQ ID NO: 1110 - protein, 15 aa, Artificial Sequence
  Description of Artificial Sequence: Synthetic peptide
  MOD_RES (8)..(8): phosphorylated serine
NRAMRRVSSVPSRAQ

SEQ ID NO: 1111 - protein, 13 aa, Artificial Sequence
  Description of Artificial Sequence: Synthetic peptide
  MOD_RES (3)..(3): phosphorylated serine
NRSWKYNQSISLR

SEQ ID NO: 1112 - protein, 15 aa, Artificial Sequence
  Description of Artificial Sequence: Synthetic peptide
  MOD_RES (3)..(3): phosphorylated serine
NRSWKYNQSISLRRP

SEQ ID NO: 1113 - protein, 10 aa, Artificial Sequence
  Description of Artificial Sequence: Synthetic peptide
  MOD_RES (4)..(4): phosphorylated threonine
NRYTNRVVTF

SEQ ID NO: 1114 - protein, 10 aa, Artificial Sequence
  Description of Artificial Sequence: Synthetic peptide
  MOD_RES (4)..(4): phosphorylated threonine
NRYTNRVVTK

SEQ ID NO: 1115 - protein, 10 aa, Artificial Sequence
  Description of Artificial Sequence: Synthetic peptide
  MOD_RES (4)..(4): phosphorylated threonine
NRYTNRVVTL

SEQ ID NO: 1116 - protein, 10 aa, Artificial Sequence
  Description of Artificial Sequence: Synthetic peptide
  MOD_RES (4)..(4): phosphorylated threonine
NRYTNRVVTM

SEQ ID NO: 1117 - protein, 10 aa, Artificial Sequence
  Description of Artificial Sequence: Synthetic peptide
  MOD_RES (4)..(4): phosphorylated threonine
NRYTNRVVTR

SEQ ID NO: 1118 - protein, 10 aa, Artificial Sequence
  Description of Artificial Sequence: Synthetic peptide
  MOD_RES (4)..(4): phosphorylated threonine
NRYTNRVVTY

SEQ ID NO: 1119 - protein, 8 aa, Artificial Sequence
  Description of Artificial Sequence: Synthetic peptide
  MOD_RES (4)..(4): phosphorylated serine
NSDSPLRY

SEQ ID NO: 1120 - protein, 8 aa, Artificial Sequence
  Description of Artificial Sequence: Synthetic peptide
  MOD_RES (4)..(4): phosphorylated serine
NSESPLRY

SEQ ID NO: 1121 - protein, 8 aa, Artificial Sequence
  Description of Artificial Sequence: Synthetic peptide
  MOD_RES (4)..(4): phosphorylated serine
NTDSPLRY

SEQ ID NO: 1122 - protein, 8 aa, Artificial Sequence
  Description of Artificial Sequence: Synthetic peptide
  MOD_RES (4)..(4): phosphorylated serine
NTESPLRY

SEQ ID NO: 1123 - protein, 9 aa, Artificial Sequence
  Description of Artificial Sequence: Synthetic peptide
  MOD_RES (8)..(8): phosphorylated serine
NYVERKNSK

SEQ ID NO: 1124 - protein, 9 aa, Artificial Sequence
  Description of Artificial Sequence: Synthetic peptide
  MOD_RES (8)..(8): phosphorylated serine
NYVERKNSL

SEQ ID NO: 1125 - protein, 9 aa, Artificial Sequence
  Description of Artificial Sequence: Synthetic peptide
  MOD_RES (8)..(8): phosphorylated serine
NYVERKNSY

SEQ ID NO: 1126 - protein, 9 aa, Artificial Sequence
  Description of Artificial Sequence: Synthetic peptide
  MOD_RES (4)..(4): phosphorylated serine
PARSPVTEI

SEQ ID NO: 1127 - protein, 9 aa, Artificial Sequence
  Description of Artificial Sequence: Synthetic peptide
  MOD_RES (7)..(7): phosphorylated serine
PAYEKLSAE

SEQ ID NO: 1128 - protein, 12 aa, Artificial Sequence
  Description of Artificial Sequence: Synthetic peptide
  MOD_RES (7)..(7): phosphorylated serine
PAYEKLSAEQSP

SEQ ID NO: 1129 - protein, 9 aa, Artificial Sequence
  Description of Artificial Sequence: Synthetic peptide
  MOD_RES (2)..(2): oxidized methionine
  MOD_RES (6)..(6): phosphorylated serine
PMVTLSLNL

SEQ ID NO: 1130 - protein, 9 aa, Artificial Sequence
  Description of Artificial Sequence: Synthetic peptide
  MOD_RES (6)..(6): phosphorylated serine
PMVTLSLNL

SEQ ID NO: 1131 - protein, 12 aa, Artificial Sequence
  Description of Artificial Sequence: Synthetic peptide
  MOD_RES (11)..(11): phosphorylated serine
PNAPPAYEKLSA

SEQ ID NO: 1132 - protein, 9 aa, Artificial Sequence
  Description of Artificial Sequence: Synthetic peptide
  MOD_RES (8)..(8): phosphorylated serine
PPAYEKLSA

SEQ ID NO: 1133 - protein, 12 aa, Artificial Sequence
  Description of Artificial Sequence: Synthetic peptide
  MOD_RES (8)..(8): phosphorylated serine
PPAYEKLSAEQS

SEQ ID NO: 1134 - protein, 21 aa, Artificial Sequence
  Description of Artificial Sequence: Synthetic peptide
  MOD_RES (18)..(18): phosphorylated serine
PPLPEDSIKVIRNMRAASPPA

SEQ ID NO: 1135 - protein, 11 aa, Artificial Sequence
  Description of Artificial Sequence: Synthetic peptide
  MOD_RES (8)..(8): phosphorylated serine
PYDPALGSPSR

SEQ ID NO: 1136 - protein, 14 aa, Artificial Sequence
  Description of Artificial Sequence: Synthetic peptide
  MOD_RES (8)..(8): phosphorylated serine
QAASNFKSPVKTIR

SEQ ID NO: 1137 - protein, 10 aa, Artificial Sequence
  Description of Artificial Sequence: Synthetic peptide
  MOD_RES (4)..(4): phosphorylated serine
QLDSPQRALY

SEQ ID NO: 1138 - protein, 10 aa, Artificial Sequence
  Description of Artificial Sequence: Synthetic peptide
  MOD_RES (4)..(4): phosphorylated serine
QLESPQRALY

SEQ ID NO: 1139 - protein, 10 aa, Artificial Sequence
  Description of Artificial Sequence: Synthetic peptide
  MOD_RES (4)..(4): phosphorylated serine
QLFSPKKGQK

SEQ ID NO: 1140 - protein, 10 aa, Artificial Sequence
  Description of Artificial Sequence: Synthetic peptide
  MOD_RES (4)..(4): phosphorylated serine
QMFSPKKGQK

SEQ ID NO: 1141 - protein, 9 aa, Artificial Sequence
  Description of Artificial Sequence: Synthetic peptide
  MOD_RES (6)..(6): phosphorylated serine
QPQRRSLRL

SEQ ID NO: 1142 - protein, 11 aa, Artificial Sequence
  Description of Artificial Sequence: Synthetic peptide
  MOD_RES (4)..(4): phosphorylated serine
QPRSPGPDYSF

SEQ ID NO: 1143 - protein, 11 aa, Artificial Sequence
  Description of Artificial Sequence: Synthetic peptide
  MOD_RES (4)..(4): phosphorylated serine
QPRSPGPDYSL

SEQ ID NO: 1144 - protein, 11 aa, Artificial Sequence
  Description of Artificial Sequence: Synthetic peptide
  MOD_RES (4)..(4): phosphorylated serine
QPRSPGPDYSM

SEQ ID NO: 1145 - protein, 11 aa, Artificial Sequence
  Description of Artificial Sequence: Synthetic peptide
  MOD_RES (4)..(4): phosphorylated serine
QPRSPGPDYSV

SEQ ID NO: 1146 - protein, 10 aa, Artificial Sequence
  Description of Artificial Sequence: Synthetic peptide
  MOD_RES (4)..(4): phosphorylated threonine
  MOD_RES (6)..(6): phosphorylated serine
QPRTPSPLVF

SEQ ID NO: 1147 - protein, 10 aa, Artificial Sequence
  Description of Artificial Sequence: Synthetic peptide
  MOD_RES (4)..(4): phosphorylated threonine
QPRTPSPLVF

SEQ ID NO: 1148 - protein, 10 aa, Artificial Sequence
  Description of Artificial Sequence: Synthetic peptide
  MOD_RES (4)..(4): phosphorylated threonine
  MOD_RES (6)..(6): phosphorylated serine
QPRTPSPLVL

SEQ ID NO: 1149 - protein, 10 aa, Artificial Sequence
  Description of Artificial Sequence: Synthetic peptide
  MOD_RES (4)..(4): phosphorylated threonine
QPRTPSPLVL

SEQ ID NO: 1150 - protein, 10 aa, Artificial Sequence
  Description of Artificial Sequence: Synthetic peptide
  MOD_RES (4)..(4): phosphorylated threonine
  MOD_RES (6)..(6): phosphorylated serine
QPRTPSPLVM

SEQ ID NO: 1151 - protein, 10 aa, Artificial Sequence
  Description of Artificial Sequence: Synthetic peptide
  MOD_RES (4)..(4): phosphorylated threonine
QPRTPSPLVM

SEQ ID NO: 1152 - protein, 10 aa, Artificial Sequence
  Description of Artificial Sequence: Synthetic peptide
  MOD_RES (4)..(4): phosphorylated threonine
  MOD_RES (6)..(6): phosphorylated serine
QPRTPSPLVV

SEQ ID NO: 1153 - protein, 10 aa, Artificial Sequence
  Description of Artificial Sequence: Synthetic peptide
  MOD_RES (4)..(4): phosphorylated threonine
QPRTPSPLVV

SEQ ID NO: 1154 - protein, 10 aa, Artificial Sequence
  Description of Artificial Sequence: Synthetic peptide
  MOD_RES (6)..(6): phosphorylated serine
QPSFPSVLPA

SEQ ID NO: 1155 - protein, 10 aa, Artificial Sequence
  Description of Artificial Sequence: Synthetic peptide
  MOD_RES (4)..(4): phosphorylated serine
QRLSPLSAAY

SEQ ID NO: 1156 - protein, 10 aa, Artificial Sequence
  Description of Artificial Sequence: Synthetic peptide
  MOD_RES (4)..(4): phosphorylated serine
QSDSPQRALY

SEQ ID NO: 1157 - protein, 10 aa, Artificial Sequence
  Description of Artificial Sequence: Synthetic peptide
  MOD_RES (4)..(4): phosphorylated serine
QSESPQRALY

SEQ ID NO: 1158 - protein, 10 aa, Artificial Sequence
  Description of Artificial Sequence: Synthetic peptide
  MOD_RES (4)..(4): phosphorylated serine
QTDSPQRALY

SEQ ID NO: 1159 - protein, 10 aa, Artificial Sequence
  Description of Artificial Sequence: Synthetic peptide
  MOD_RES (4)..(4): phosphorylated serine
QTESPQRALY

SEQ ID NO: 1160 - protein, 28 aa, Artificial Sequence
  Description of Artificial Sequence: Synthetic peptide
  MOD_RES (14)..(14): phosphorylated serine
QVAMPVKKSPRRSSSDEQGLSYSSLKNV

SEQ ID NO: 1161 - protein, 10 aa, Artificial Sequence
  Description of Artificial Sequence: Synthetic peptide
  MOD_RES (4)..(4): phosphorylated serine
QVFSPKKGQK

SEQ ID NO: 1162 - protein, 10 aa, Artificial Sequence
  Description of Artificial Sequence: Synthetic peptide
  MOD_RES (4)..(4): phosphorylated serine
QVFSPKKGQY

SEQ ID NO: 1163 - protein, 8 aa, Artificial Sequence
  Description of Artificial Sequence: Synthetic peptide
  MOD_RES (4)..(4): phosphorylated serine
RADSPVHM

SEQ ID NO: 1164 - protein, 10 aa, Artificial Sequence
  Description of Artificial Sequence: Synthetic peptide
  MOD_RES (4)..(4): phosphorylated serine
RAFSFSKTPK

SEQ ID NO: 1165 - protein, 10 aa, Artificial Sequence
  Description of Artificial Sequence: Synthetic peptide
  MOD_RES (4)..(4): phosphorylated serine
RAFSFSKTPY

SEQ ID NO: 1166 - protein, 9 aa, Artificial Sequence
  Description of Artificial Sequence: Synthetic peptide
  MOD_RES (4)..(4): phosphorylated serine
RAFSVKFEV

SEQ ID NO: 1167 - protein, 9 aa, Artificial Sequence
  Description of Artificial Sequence: Synthetic peptide
  MOD_RES (4)..(4): phosphorylated serine
RAHSEPLAL

SEQ ID NO: 1168 - protein, 9 aa, Artificial Sequence
  Description of Artificial Sequence: Synthetic peptide
  MOD_RES (4)..(4): phosphorylated serine
RAHSSPASL

SEQ ID NO: 1169 - protein, 9 aa, Artificial Sequence
  Description of Artificial Sequence: Synthetic peptide
  MOD_RES (5)..(5): phosphorylated serine
RAHSSPASL

SEQ ID NO: 1170 - protein, 9 aa, Artificial Sequence
  Description of Artificial Sequence: Synthetic peptide
  MOD_RES (4)..(4): phosphorylated serine
RAKSPISLK

SEQ ID NO: 1171 - protein, 9 aa, Artificial Sequence
  Description of Artificial Sequence: Synthetic peptide
  MOD_RES (4)..(4): phosphorylated serine
RAKSPISLY

SEQ ID NO: 1172 - protein, 9 aa, Artificial Sequence
  Description of Artificial Sequence: Synthetic peptide
  MOD_RES (4)..(4): phosphorylated serine
RAPSPSSRF

SEQ ID NO: 1173 - protein, 9 aa, Artificial Sequence
  Description of Artificial Sequence: Synthetic peptide
  MOD_RES (4)..(4): phosphorylated serine
RAPSPSSRL

SEQ ID NO: 1174 - protein, 9 aa, Artificial Sequence
  Description of Artificial Sequence: Synthetic peptide
  MOD_RES (4)..(4): phosphorylated serine
RAPSPSSRM

SEQ ID NO: 1175 - protein, 9 aa, Artificial Sequence
  Description of Artificial Sequence: Synthetic peptide
  MOD_RES (4)..(4): phosphorylated serine
RAPSPSSRV

SEQ ID NO: 1176 - protein, 10 aa, Artificial Sequence
  Description of Artificial Sequence: Synthetic peptide
  MOD_RES (6)..(6): phosphorylated serine
RARGISPIVF

SEQ ID NO: 1177 - protein, 9 aa, Artificial Sequence
  Description of Artificial Sequence: Synthetic peptide
  MOD_RES (4)..(4): phosphorylated serine
  MOD_RES (8)..(8): phosphorylated serine
RASSDIVSL

SEQ ID NO: 1178 - protein, 9 aa, Artificial Sequence
  Description of Artificial Sequence: Synthetic peptide
  MOD_RES (4)..(4): phosphorylated serine
RASSDIVSL

SEQ ID NO: 1179 - protein, 9 aa, Artificial Sequence
  Description of Artificial Sequence: Synthetic peptide
  MOD_RES (4)..(4): phosphorylated serine
RASSLSITV

SEQ ID NO: 1180 - protein, 9 aa, Artificial Sequence
  Description of Artificial Sequence: Synthetic peptide
  MOD_RES (5)..(5): phosphorylated serine
  MOD_RES (8)..(8): oxidized methionine
REAPSPLMI

SEQ ID NO: 1181 - protein, 9 aa, Artificial Sequence
  Description of Artificial Sequence: Synthetic peptide
  MOD_RES (5)..(5): phosphorylated serine
REAPSPLMI

SEQ ID NO: 1182 - protein, 9 aa, Artificial Sequence
  Description of Artificial Sequence: Synthetic peptide
  MOD_RES (4)..(4): phosphorylated serine
REASPAPLA

SEQ ID NO: 1183 - protein, 9 aa, Artificial Sequence
  Description of Artificial Sequence: Synthetic peptide
  MOD_RES (4)..(4): phosphorylated serine
REASPRLRV

SEQ ID NO: 1184 - protein, 10 aa, Artificial Sequence
  Description of Artificial Sequence: Synthetic peptide
  MOD_RES (4)..(4): phosphorylated serine
REASPSRLSV

SEQ ID NO: 1185 - protein, 11 aa, Artificial Sequence
  Description of Artificial Sequence: Synthetic peptide
  MOD_RES (4)..(4): phosphorylated serine
REDSTPGKVFL

SEQ ID NO: 1186 - protein, 10 aa, Artificial Sequence
  Description of Artificial Sequence: Synthetic peptide
  MOD_RES (6)..(6): phosphorylated threonine
REIMGTPEYL

SEQ ID NO: 1187 - protein, 9 aa, Artificial Sequence
  Description of Artificial Sequence: Synthetic peptide
  MOD_RES (4)..(4): phosphorylated serine
  MOD_RES (8)..(8): oxidized methionine
REKSPGRML

SEQ ID NO: 1188 - protein, 9 aa, Artificial Sequence
  Description of Artificial Sequence: Synthetic peptide
  MOD_RES (4)..(4): phosphorylated serine
REKSPGRML

SEQ ID NO: 1189 - protein, 9 aa, Artificial Sequence
  Description of Artificial Sequence: Synthetic peptide
  MOD_RES (4)..(4): phosphorylated serine
REKSPLFQF

SEQ ID NO: 1190 - protein, 9 aa, Artificial Sequence
  Description of Artificial Sequence: Synthetic peptide
  MOD_RES (4)..(4): phosphorylated serine
REKSPLFQW

SEQ ID NO: 1191 - protein, 9 aa, Artificial Sequence
  Description of Artificial Sequence: Synthetic peptide
  MOD_RES (4)..(4): phosphorylated serine
REKSPLFQY

SEQ ID NO: 1192 - protein, 9 aa, Artificial Sequence
  Description of Artificial Sequence: Synthetic peptide
  MOD_RES (8)..(8): phosphorylated serine
RELARKGSL

SEQ ID NO: 1193 - protein, 9 aa, Artificial Sequence
  Description of Artificial Sequence: Synthetic peptide
  MOD_RES (4)..(4): phosphorylated serine
RELSPLISL

SEQ ID NO: 1194 - protein, 9 aa, Artificial Sequence
  Description of Artificial Sequence: Synthetic peptide
  MOD_RES (4)..(4): phosphorylated serine
REPSPLPEL

SEQ ID NO: 1195 - protein, 9 aa, Artificial Sequence
  Description of Artificial Sequence: Synthetic peptide
  MOD_RES (4)..(4): phosphorylated serine
RERSPSPSF

SEQ ID NO: 1196 - protein, 9 aa, Artificial Sequence
  Description of Artificial Sequence: Synthetic peptide
  MOD_RES (4)..(4): phosphorylated serine
RESSPTRRL

SEQ ID NO: 1197 - protein, 9 aa, Artificial Sequence
  Description of Artificial Sequence: Synthetic peptide
  MOD_RES (4)..(4): phosphorylated serine
REVSPAPAV

SEQ ID NO: 1198 - protein, 9 aa, Artificial Sequence
  Description of Artificial Sequence: Synthetic peptide
  MOD_RES (5)..(5): phosphorylated serine
REYGSTSSI

SEQ ID NO: 1199 - protein, 9 aa, Artificial Sequence
  Description of Artificial Sequence: Synthetic peptide
  MOD_RES (4)..(4): phosphorylated threonine
RFKTQPVTF

SEQ ID NO: 1200 - protein, 8 aa, Artificial Sequence
  Description of Artificial Sequence: Synthetic peptide
  MOD_RES (7)..(7): phosphorylated threonine
RGDGYGTF

SEQ ID NO: 1201 - protein, 9 aa, Artificial Sequence
  Description of Artificial Sequence: Synthetic peptide
  MOD_RES (4)..(4): phosphorylated serine
RGDSPKIDL

SEQ ID NO: 1202 - protein, 11 aa, Artificial Sequence
  Description of Artificial Sequence: Synthetic peptide
  MOD_RES (4)..(4): phosphorylated serine
RIDSKDSASEL

SEQ ID NO: 1203 - protein, 9 aa, Artificial Sequence
  Description of Artificial Sequence: Synthetic peptide
  MOD_RES (4)..(4): phosphorylated serine
RIGSPLSPK

SEQ ID NO: 1204 - protein, 9 aa, Artificial Sequence
  Description of Artificial Sequence: Synthetic peptide
  MOD_RES (4)..(4): phosphorylated serine
RILSGVVTK

SEQ ID NO: 1205 - protein, 9 aa, Artificial Sequence
  Description of Artificial Sequence: Synthetic peptide
  MOD_RES (4)..(4): phosphorylated serine
RILSGVVTY

SEQ ID NO: 1206 - protein, 10 aa, Artificial Sequence
  Description of Artificial Sequence: Synthetic peptide
  MOD_RES (4)..(4): phosphorylated serine
RILSPSMASK

SEQ ID NO: 1207 - protein, 10 aa, Artificial Sequence
  Description of Artificial Sequence: Synthetic peptide
  MOD_RES (4)..(4): phosphorylated serine
RILSPSMASY

SEQ ID NO: 1208 - protein, 9 aa, Artificial Sequence
  Description of Artificial Sequence: Synthetic peptide
  MOD_RES (4)..(4): phosphorylated serine
RINSFEEHV

SEQ ID NO: 1209 - protein, 9 aa, Artificial Sequence
  Description of Artificial Sequence: Synthetic peptide
  MOD_RES (4)..(4): phosphorylated serine
RIQSKLYRA

SEQ ID NO: 1210 - protein, 9 aa, Artificial Sequence
  Description of Artificial Sequence: Synthetic peptide
  MOD_RES (4)..(4): phosphorylated tyrosine
RIQYIQSRF

SEQ ID NO: 1211 - protein, 10 aa, Artificial Sequence
  Description of Artificial Sequence: Synthetic peptide
  MOD_RES (4)..(4): phosphorylated tyrosine
RIQYIQSRFY

SEQ ID NO: 1212 - protein, 8 aa, Artificial Sequence
  Description of Artificial Sequence: Synthetic peptide
  MOD_RES (3)..(3): phosphorylated serine
RISHELDS

SEQ ID NO: 1213 - protein, 9 aa, Artificial Sequence
  Description of Artificial Sequence: Synthetic peptide
  MOD_RES (4)..(4): phosphorylated serine
RITSLIVHV

SEQ ID NO: 1214 - protein, 9 aa, Artificial Sequence
  Description of Artificial Sequence: Synthetic peptide
  MOD_RES (5)..(5): phosphorylated tyrosine
RIVQYIQSR

SEQ ID NO: 1215 - protein, 7 aa, Artificial Sequence
  Description of Artificial Sequence: Synthetic peptide
  MOD_RES (5)..(5): phosphorylated tyrosine
RIYQYIQ

SEQ ID NO: 1216 - protein, 9 aa, Artificial Sequence
  Description of Artificial Sequence: Synthetic peptide
  MOD_RES (5)..(5): phosphorylated tyrosine
RIYQYIQSK

SEQ ID NO: 1217 - protein, 9 aa, Artificial Sequence
  Description of Artificial Sequence: Synthetic peptide
  MOD_RES (5)..(5): phosphorylated tyrosine
RIYQYIQSR

SEQ ID NO: 1218 - protein, 10 aa, Artificial Sequence
  Description of Artificial Sequence: Synthetic peptide
  MOD_RES (5)..(5): phosphorylated tyrosine
RIYQYIQSRF

SEQ ID NO: 1219 - protein, 11 aa, Artificial Sequence
  Description of Artificial Sequence: Synthetic peptide
  MOD_RES (5)..(5): phosphorylated tyrosine
RIYQYIQSRFK

SEQ ID NO: 1220 - protein, 11 aa, Artificial Sequence
  Description of Artificial Sequence: Synthetic peptide
  MOD_RES (5)..(5): phosphorylated tyrosine
RIYQYIQSRFY

SEQ ID NO: 1221 - protein, 10 aa, Artificial Sequence
  Description of Artificial Sequence: Synthetic peptide
  MOD_RES (5)..(5): phosphorylated tyrosine
RIYQYIQSRK

SEQ ID NO: 1222 - protein, 10 aa, Artificial Sequence
  Description of Artificial Sequence: Synthetic peptide
  MOD_RES (5)..(5): phosphorylated tyrosine
RIYQYIQSRY

SEQ ID NO: 1223 - protein, 9 aa, Artificial Sequence
  Description of Artificial Sequence: Synthetic peptide
  MOD_RES (5)..(5): phosphorylated tyrosine
RIYQYIQSY

SEQ ID NO: 1224 - protein, 10 aa, Artificial Sequence
  Description of Artificial Sequence: Synthetic peptide
  MOD_RES (5)..(5): phosphorylated tyrosine
RIYQYLQSRF

SEQ ID NO: 1225 - protein, 11 aa, Artificial Sequence
  Description of Artificial Sequence: Synthetic peptide
  MOD_RES (5)..(5): phosphorylated tyrosine
RIYQYLQSRFY

SEQ ID NO: 1226 - protein, 9 aa, Artificial Sequence
  Description of Artificial Sequence: Synthetic peptide
  MOD_RES (5)..(5): phosphorylated serine
RKLRSLEQL

SEQ ID NO: 1227 - protein, 9 aa, Artificial Sequence
  Description of Artificial Sequence: Synthetic peptide
  MOD_RES (4)..(4): phosphorylated serine
RKLSVILIK

SEQ ID NO: 1228 - protein, 9 aa, Artificial Sequence
  Description of Artificial Sequence: Synthetic peptide
  MOD_RES (4)..(4): phosphorylated serine
RKLSVILIL

SEQ ID NO: 1229 - protein, 9 aa, Artificial Sequence
  Description of Artificial Sequence: Synthetic peptide
  MOD_RES (4)..(4): phosphorylated serine
RKLSVILIY

SEQ ID NO: 1230 - protein, 9 aa, Artificial Sequence
  Description of Artificial Sequence: Synthetic peptide
  MOD_RES (4)..(4): phosphorylated serine
RKPSIVTKY

SEQ ID NO: 1231 - protein, 9 aa, Artificial Sequence
  Description of Artificial Sequence: Synthetic peptide
  MOD_RES (4)..(4): phosphorylated serine
RKSSIIIRM

SEQ ID NO: 1232 - protein, 9 aa, Artificial Sequence
  Description of Artificial Sequence: Synthetic peptide
  MOD_RES (4)..(4): phosphorylated serine
RLASASRAL

SEQ ID NO: 1233 - protein, 9 aa, Artificial Sequence
  Description of Artificial Sequence: Synthetic peptide
  MOD_RES (4)..(4): phosphorylated serine
RLASFAVRK

SEQ ID NO: 1234 - protein, 9 aa, Artificial Sequence
  Description of Artificial Sequence: Synthetic peptide
  MOD_RES (4)..(4): phosphorylated serine
RLASFAVRY

SEQ ID NO: 1235 - protein, 10 aa, Artificial Sequence
  Description of Artificial Sequence: Synthetic peptide
  MOD_RES (4)..(4): phosphorylated serine
RLASIELPSM

SEQ ID NO: 1236 - protein, 12 aa, Artificial Sequence
  Description of Artificial Sequence: Synthetic peptide
  MOD_RES (4)..(4): phosphorylated serine
RLASIELPSMAV

SEQ ID NO: 1237 - protein, 10 aa, Artificial Sequence
  Description of Artificial Sequence: Synthetic peptide
  MOD_RES (4)..(4): phosphorylated serine
RLASIELPSV

SEQ ID NO: 1238 - protein, 10 aa, Artificial Sequence
  Description of Artificial Sequence: Synthetic peptide
  MOD_RES (4)..(4): phosphorylated serine
RLASLNAEAL

SEQ ID NO: 1239 - protein, 10 aa, Artificial Sequence
  Description of Artificial Sequence: Synthetic peptide
  MOD_RES (4)..(4): phosphorylated serine
RLASLNAEAV

SEQ ID NO: 1240 - protein, 9 aa, Artificial Sequence
  Description of Artificial Sequence: Synthetic peptide
  MOD_RES (4)..(4): phosphorylated serine
RLASLQSEV

SEQ ID NO: 1241 - protein, 9 aa, Artificial Sequence
  Description of Artificial Sequence: Synthetic peptide
  MOD_RES (4)..(4): phosphorylated serine
RLASLSISV

SEQ ID NO: 1242 - protein, 9 aa, Artificial Sequence
  Description of Artificial Sequence: Synthetic peptide
  MOD_RES (4)..(4): phosphorylated serine
RLASPLVHK

SEQ ID NO: 1243 - protein, 9 aa, Artificial Sequence
  Description of Artificial Sequence: Synthetic peptide
  MOD_RES (4)..(4): phosphorylated serine
RLASPLVHY

SEQ ID NO: 1244 - protein, 10 aa, Artificial Sequence
  Description of Artificial Sequence: Synthetic peptide
  MOD_RES (4)..(4): phosphorylated serine
RLASPPPPPK

SEQ ID NO: 1245 - protein, 10 aa, Artificial Sequence
  Description of Artificial Sequence: Synthetic peptide
  MOD_RES (4)..(4): phosphorylated serine
RLASPPPPPY

SEQ ID NO: 1246 - protein, 9 aa, Artificial Sequence
  Description of Artificial Sequence: Synthetic peptide
  MOD_RES (4)..(4): phosphorylated serine
RLASPTSGV

SEQ ID NO: 1247 - protein, 10 aa, Artificial Sequence
  Description of Artificial Sequence: Synthetic peptide
  MOD_RES (4)..(4): phosphorylated serine
RLASPTSGVK

SEQ ID NO: 1248 - protein, 11 aa, Artificial Sequence
  Description of Artificial Sequence: Synthetic peptide
  MOD_RES (4)..(4): phosphorylated serine
RLASPTSGVKK

SEQ ID NO: 1249 - protein, 11 aa, Artificial Sequence
  Description of Artificial Sequence: Synthetic peptide
  MOD_RES (4)..(4): phosphorylated serine
RLASPTSGVKR

SEQ ID NO: 1250 - protein, 11 aa, Artificial Sequence
  Description of Artificial Sequence: Synthetic peptide
  MOD_RES (4)..(4): phosphorylated serine
RLASPTSGVKY

SEQ ID NO: 1251 - protein, 9 aa, Artificial Sequence
  Description of Artificial Sequence: Synthetic peptide
  MOD_RES (4)..(4): phosphorylated serine
RLASRPLLL

SEQ ID NO: 1252 - protein, 11 aa, Artificial Sequence
  Description of Artificial Sequence: Synthetic peptide
  MOD_RES (4)..(4): phosphorylated serine
RLASSATQVHK

SEQ ID NO: 1253 - protein, 9 aa, Artificial Sequence
  Description of Artificial Sequence: Synthetic peptide
  MOD_RES (4)..(4): phosphorylated serine
RLASYLDKV

SEQ ID NO: 1254 - protein, 9 aa, Artificial Sequence
  Description of Artificial Sequence: Synthetic peptide
  MOD_RES (4)..(4): phosphorylated serine
RLASYLDRV

SEQ ID NO: 1255 - protein, 11 aa, Artificial Sequence
  Description of Artificial Sequence: Synthetic peptide
  MOD_RES (4)..(4): phosphorylated serine
RLDSTPGKVFL

SEQ ID NO: 1256 - protein, 11 aa, Artificial Sequence
  Description of Artificial Sequence: Synthetic peptide
  MOD_RES (4)..(4): phosphorylated serine
RLDSTPGKVFV

SEQ ID NO: 1257 - protein, 9 aa, Artificial Sequence
  Description of Artificial Sequence: Synthetic peptide
  MOD_RES (4)..(4): phosphorylated serine
RLDSYLRAP

SEQ ID NO: 1258 - protein, 7 aa, Artificial Sequence
  Description of Artificial Sequence: Synthetic peptide
  MOD_RES (4)..(4): phosphorylated serine
RLDSYVR

SEQ ID NO: 1259 - protein, 8 aa, Artificial Sequence
  Description of Artificial Sequence: Synthetic peptide
  MOD_RES (4)..(4): phosphorylated serine
RLDSYVRS

SEQ ID NO: 1260 - protein, 9 aa, Artificial Sequence
  Description of Artificial Sequence: Synthetic peptide
  MOD_RES (4)..(4): phosphorylated serine
RLDSYVRSL

SEQ ID NO: 1261 - protein, 9 aa, Artificial Sequence
  Description of Artificial Sequence: Synthetic peptide
  MOD_RES (4)..(4): phosphorylated serine
RLDSYVRSV

SEQ ID NO: 1262 - protein, 9 aa, Artificial Sequence
  Description of Artificial Sequence: Synthetic peptide
  MOD_RES (4)..(4): phosphorylated threonine
RLDTGPQSL

SEQ ID NO: 1263 - protein, 9 aa, Artificial Sequence
  Description of Artificial Sequence: Synthetic peptide
  MOD_RES (4)..(4): phosphorylated serine
RLESANRRL

SEQ ID NO: 1264 - protein, 10 aa, Artificial Sequence
  Description of Artificial Sequence: Synthetic peptide
  MOD_RES (4)..(4): phosphorylated serine
RLFSFSKTPK

SEQ ID NO: 1265 - protein, 7 aa, Artificial Sequence
  Description of Artificial Sequence: Synthetic peptide
  MOD_RES (4)..(4): phosphorylated serine
RLFSKEL

SEQ ID NO: 1266 - protein, 8 aa, Artificial Sequence
  Description of Artificial Sequence: Synthetic peptide
  MOD_RES (4)..(4): phosphorylated serine
RLFSKELR

SEQ ID NO: 1267 - protein, 9 aa, Artificial Sequence
  Description of Artificial Sequence: Synthetic peptide
  MOD_RES (4)..(4): phosphorylated serine
RLFSKELRC

SEQ ID NO: 1268 - protein, 9 aa, Artificial Sequence
  Description of Artificial Sequence: Synthetic peptide
  MOD_RES (4)..(4): phosphorylated serine
RLFSKELRV

SEQ ID NO: 1269 - protein, 10 aa, Artificial Sequence
  Description of Artificial Sequence: Synthetic peptide
  MOD_RES (6)..(6): phosphorylated serine
RLFSLSNPSL

SEQ ID NO: 1270 - protein, 9 aa, Artificial Sequence
  Description of Artificial Sequence: Synthetic peptide
  MOD_RES (4)..(4): phosphorylated serine
RLFSPTYGL

SEQ ID NO: 1271 - protein, 9 aa, Artificial Sequence
  Description of Artificial Sequence: Synthetic peptide
  MOD_RES (4)..(4): phosphorylated serine
RLFSPTYGV

SEQ ID NO: 1272 - protein, 9 aa, Artificial Sequence
  Description of Artificial Sequence: Synthetic peptide
  MOD_RES (4)..(4): phosphorylated serine
RLFSQGQDV

SEQ ID NO: 1273 - protein, 9 aa, Artificial Sequence
  Description of Artificial Sequence: Synthetic peptide
  MOD_RES (6)..(6): phosphorylated serine
RLFVGSIPK

SEQ ID NO: 1274 - protein, 10 aa, Artificial Sequence
  Description of Artificial Sequence: Synthetic peptide
  MOD_RES (4)..(4): phosphorylated serine
RLGSFHELLL

SEQ ID NO: 1275 - protein, 9 aa, Artificial Sequence
  Description of Artificial Sequence: Synthetic peptide
  MOD_RES (4)..(4): phosphorylated serine
RLISFKAEV

SEQ ID NO: 1276 - protein, 9 aa, Artificial Sequence
  Description of Artificial Sequence: Synthetic peptide
  MOD_RES (4)..(4): phosphorylated serine
RLISPYKKK

SEQ ID NO: 1277 - protein, 9 aa, Artificial Sequence
  Description of Artificial Sequence: Synthetic peptide
  MOD_RES (4)..(4): phosphorylated serine
RLISQDVKL

SEQ ID NO: 1278 - protein, 9 aa, Artificial Sequence
  Description of Artificial Sequence: Synthetic peptide
  MOD_RES (4)..(4): phosphorylated serine
RLISQDVKV

SEQ ID NO: 1279 - protein, 9 aa, Artificial Sequence
  Description of Artificial Sequence: Synthetic peptide
  MOD_RES (6)..(6): phosphorylated serine
RLKLPSGSK

SEQ ID NO: 1280 - protein, 10 aa, Artificial Sequence
  Description of Artificial Sequence: Synthetic peptide
  MOD_RES (6)..(6): phosphorylated serine
RLKLPSGSKK

SEQ ID NO: 1281 - protein, 10 aa, Artificial Sequence
  Description of Artificial Sequence: Synthetic peptide
  MOD_RES (6)..(6): phosphorylated serine
RLKLPSGSKY

SEQ ID NO: 1282 - protein, 11 aa, Artificial Sequence
  Description of Artificial Sequence: Synthetic peptide
  MOD_RES (4)..(4): phosphorylated serine
RLKSDERPVHI

SEQ ID NO: 1283 - protein, 9 aa, Artificial Sequence
  Description of Artificial Sequence: Synthetic peptide
  MOD_RES (4)..(4): phosphorylated serine
RLKSPFRKK

SEQ ID NO: 1284 - protein, 11 aa, Artificial Sequence
  Description of Artificial Sequence: Synthetic peptide
  MOD_RES (4)..(4): phosphorylated serine
  MOD_RES (7)..(7): phosphorylated serine
RLKSPGSGHVK

SEQ ID NO: 1285 - protein, 9 aa, Artificial Sequence
  Description of Artificial Sequence: Synthetic peptide
  MOD_RES (4)..(4): phosphorylated serine
RLKSPISLK

SEQ ID NO: 1286 - protein, 9 aa, Artificial Sequence
  Description of Artificial Sequence: Synthetic peptide
  MOD_RES (4)..(4): phosphorylated serine
RLKSPISLY

SEQ ID NO: 1287 - protein, 11 aa, Artificial Sequence
  Description of Artificial Sequence: Synthetic peptide
  MOD_RES (4)..(4): phosphorylated serine
RLKSPSPKSEK

SEQ ID NO: 1288 - protein, 11 aa, Artificial Sequence
  Description of Artificial Sequence: Synthetic peptide
  MOD_RES (4)..(4): phosphorylated serine
RLKSPSPKSER

SEQ ID NO: 1289 - protein, 11 aa, Artificial Sequence
  Description of Artificial Sequence: Synthetic peptide
  MOD_RES (4)..(4): phosphorylated threonine
RLKTPTSQSYK

SEQ ID NO: 1290 - protein, 11 aa, Artificial Sequence
  Description of Artificial Sequence: Synthetic peptide
  MOD_RES (4)..(4): phosphorylated threonine
RLKTPTSQSYR

SEQ ID NO: 1291 - protein, 9 aa, Artificial Sequence
  Description of Artificial Sequence: Synthetic peptide
  MOD_RES (5)..(5): phosphorylated threonine
RLKTTPLRK

SEQ ID NO: 1292 - protein, 9 aa, Artificial Sequence
  Description of Artificial Sequence: Synthetic peptide
  MOD_RES (5)..(5): phosphorylated threonine
RLKTTPLRR

SEQ ID NO: 1293 - protein, 11 aa, Artificial Sequence
  Description of Artificial Sequence: Synthetic peptide
  MOD_RES (6)..(6): phosphorylated serine
RLLDPSSPLAL

SEQ ID NO: 1294 - protein, 11 aa, Artificial Sequence
  Description of Artificial Sequence: Synthetic peptide
  MOD_RES (7)..(7): phosphorylated serine
RLLDPSSPLAL

SEQ ID NO: 1295 - protein, 12 aa, Artificial Sequence
  Description of Artificial Sequence: Synthetic peptide
  MOD_RES (8)..(8): phosphorylated serine
RLLDRSPSRSAK

SEQ ID NO: 1296 - protein, 12 aa, Artificial Sequence
  Description of Artificial Sequence: Synthetic peptide
  MOD_RES (8)..(8): phosphorylated serine
RLLDRSPSRSAY

SEQ ID NO: 1297 - protein, 10 aa, Artificial Sequence
  Description of Artificial Sequence: Synthetic peptide
  MOD_RES (4)..(4): phosphorylated serine
RLLSDGQQHL

SEQ ID NO: 1298 - protein, 9 aa, Artificial Sequence
  Description of Artificial Sequence: Synthetic peptide
  MOD_RES (4)..(4): phosphorylated serine
RLLSDLEEL

SEQ ID NO: 1299 - protein, 9 aa, Artificial Sequence
  Description of Artificial Sequence: Synthetic peptide
  MOD_RES (4)..(4): phosphorylated serine
RLLSDQTRL

SEQ ID NO: 1300 - protein, 9 aa, Artificial Sequence
  Description of Artificial Sequence: Synthetic peptide
  MOD_RES (4)..(4): phosphorylated serine
RLLSFQRYL

SEQ ID NO: 1301 - protein, 9 aa, Artificial Sequence
  Description of Artificial Sequence: Synthetic peptide
  MOD_RES (4)..(4): phosphorylated serine
RLLSGVVTK

SEQ ID NO: 1302 - protein, 9 aa, Artificial Sequence
  Description of Artificial Sequence: Synthetic peptide
  MOD_RES (4)..(4): phosphorylated serine
RLLSGVVTY

SEQ ID NO: 1303 - protein, 9 aa, Artificial Sequence
  Description of Artificial Sequence: Synthetic peptide
  MOD_RES (4)..(4): phosphorylated serine
RLLSHISEA

SEQ ID NO: 1304 - protein, 9 aa, Artificial Sequence
  Description of Artificial Sequence: Synthetic peptide
  MOD_RES (4)..(4): phosphorylated serine
RLLSHISEV

SEQ ID NO: 1305 - protein, 9 aa, Artificial Sequence
  Description of Artificial Sequence: Synthetic peptide
  MOD_RES (4)..(4): phosphorylated serine
RLLSPLSSA

SEQ ID NO: 1306 - protein, 11 aa, Artificial Sequence
  Description of Artificial Sequence: Synthetic peptide
  MOD_RES (4)..(4): phosphorylated serine
RLLSPLSSARL

SEQ ID NO: 1307 - protein, 9 aa, Artificial Sequence
  Description of Artificial Sequence: Synthetic peptide
  MOD_RES (4)..(4): phosphorylated serine
RLLSPLSSV

SEQ ID NO: 1308 - protein, 10 aa, Artificial Sequence
  Description of Artificial Sequence: Synthetic peptide
  MOD_RES (4)..(4): phosphorylated serine
RLLSPQQPAL

SEQ ID NO: 1309 - protein, 9 aa, Artificial Sequence
  Description of Artificial Sequence: Synthetic peptide
  MOD_RES (4)..(4): phosphorylated serine
RLLSPRPSL

SEQ ID NO: 1310 - protein, 10 aa, Artificial Sequence
  Description of Artificial Sequence: Synthetic peptide
  MOD_RES (4)..(4): phosphorylated serine
RLLSPRPSLL

SEQ ID NO: 1311 - protein, 10 aa, Artificial Sequence
  Description of Artificial Sequence: Synthetic peptide
  MOD_RES (4)..(4): phosphorylated serine
RLLSPSMASK

SEQ ID NO: 1312 - protein, 10 aa, Artificial Sequence
  Description of Artificial Sequence: Synthetic peptide
  MOD_RES (4)..(4): phosphorylated serine
RLLSSGVSEI

SEQ ID NO: 1313 - protein, 10 aa, Artificial Sequence
  Description of Artificial Sequence: Synthetic peptide
  MOD_RES (4)..(4): phosphorylated serine
RLLSSGVSEV

SEQ ID NO: 1314 - protein, 10 aa, Artificial Sequence
  Description of Artificial Sequence: Synthetic peptide
  MOD_RES (4)..(4): phosphorylated serine
RLLSTDAEAV

SEQ ID NO: 1315 - protein, 9 aa, Artificial Sequence
  Description of Artificial Sequence: Synthetic peptide
  MOD_RES (4)..(4): phosphorylated serine
RLLSVEIVK

SEQ ID NO: 1316 - protein, 9 aa, Artificial Sequence
  Description of Artificial Sequence: Synthetic peptide
  MOD_RES (4)..(4): phosphorylated serine
RLLSVEIVY

SEQ ID NO: 1317 - protein, 10 aa, Artificial Sequence
  Description of Artificial Sequence: Synthetic peptide
  MOD_RES (4)..(4): phosphorylated serine
RLLSVHDFDF

SEQ ID NO: 1318 - protein, 9 aa, Artificial Sequence
  Description of Artificial Sequence: Synthetic peptide
  MOD_RES (4)..(4): phosphorylated serine
RLLSVILIK

SEQ ID NO: 1319 - protein, 9 aa, Artificial Sequence
  Description of Artificial Sequence: Synthetic peptide
  MOD_RES (4)..(4): phosphorylated serine
RLMSMPVAK

SEQ ID NO: 1320 - protein, 9 aa, Artificial Sequence
  Description of Artificial Sequence: Synthetic peptide
  MOD_RES (4)..(4): phosphorylated serine
RLMSMPVAY

SEQ ID NO: 1321 - protein, 10 aa, Artificial Sequence
  Description of Artificial Sequence: Synthetic peptide
  MOD_RES (4)..(4): phosphorylated threonine
RLNTSDFQKL

SEQ ID NO: 1322 - protein, 9 aa, Artificial Sequence
  Description of Artificial Sequence: Synthetic peptide
  MOD_RES (8)..(8): phosphorylated serine
RLPNRIPSL

SEQ ID NO: 1323 - protein, 10 aa, Artificial Sequence
  Description of Artificial Sequence: Synthetic peptide
  MOD_RES (4)..(4): phosphorylated serine
RLPSFLKKNK

SEQ ID NO: 1324 - protein, 9 aa, Artificial Sequence
  Description of Artificial Sequence: Synthetic peptide
  MOD_RES (4)..(4): phosphorylated serine
RLPSLVHGY

SEQ ID NO: 1325 - protein, 9 aa, Artificial Sequence
  Description of Artificial Sequence: Synthetic peptide
  MOD_RES (4)..(4): phosphorylated serine
RLPSSTLKK

SEQ ID NO: 1326 - protein, 9 aa, Artificial Sequence
  Description of Artificial Sequence: Synthetic peptide
  MOD_RES (4)..(4): phosphorylated serine
RLPSSTLKR

SEQ ID NO: 1327 - protein, 9 aa, Artificial Sequence
  Description of Artificial Sequence: Synthetic peptide
  MOD_RES (4)..(4): phosphorylated serine
RLPSSTLKY

SEQ ID NO: 1328 - protein, 9 aa, Artificial Sequence
  Description of Artificial Sequence: Synthetic peptide
  MOD_RES (4)..(4): phosphorylated serine
RLQSLIKNI

SEQ ID NO: 1329 - protein, 9 aa, Artificial Sequence
  Description of Artificial Sequence: Synthetic peptide
  MOD_RES (4)..(4): phosphorylated serine
RLQSTSERL

SEQ ID NO: 1330 - protein, 9 aa, Artificial Sequence
  Description of Artificial Sequence: Synthetic peptide
  MOD_RES (4)..(4): phosphorylated serine
RLQSTSERV

SEQ ID NO: 1331 - protein, 12 aa, Artificial Sequence
  Description of Artificial Sequence: Synthetic peptide
  MISC_FEATURE (4)..(7): at least one serine residue in the amino acid sequence SLSS is phosphorylated
RLRSLSSPTVTL

SEQ ID NO: 1332 - protein, 12 aa, Artificial Sequence
  Description of Artificial Sequence: Synthetic peptide
  MISC_FEATURE (4)..(7): at least one serine residue in the amino acid sequence SLSS is phosphorylated
RLRSLSSPTVTV

SEQ ID NO: 1333 - protein, 10 aa, Artificial Sequence
  Description of Artificial Sequence: Synthetic peptide
  MOD_RES (5)..(5): phosphorylated serine
RLRQSPLATK

SEQ ID NO: 1334 - protein, 10 aa, Artificial Sequence
  Description of Artificial Sequence: Synthetic peptide
  MOD_RES (5)..(5): phosphorylated serine
RLRQSPLATR

SEQ ID NO: 1335 - protein, 10 aa, Artificial Sequence
  Description of Artificial Sequence: Synthetic peptide
  MOD_RES (5)..(5): phosphorylated serine
RLRQSPLATY

SEQ ID NO: 1336 - protein, 9 aa, Artificial Sequence
  Description of Artificial Sequence: Synthetic peptide
  MOD_RES (5)..(5): phosphorylated serine
RLRRSPLLK

SEQ ID NO: 1337 - protein, 10 aa, Artificial Sequence
  Description of Artificial Sequence: Synthetic peptide
  MOD_RES (4)..(4): phosphorylated serine
RLRSAGAAQK

SEQ ID NO: 1338 - protein, 11 aa, Artificial Sequence
  Description of Artificial Sequence: Synthetic peptide
  MOD_RES (4)..(4): phosphorylated serine
RLRSLSSLREK

SEQ ID NO: 1339 - protein, 10 aa, Artificial Sequence
  Description of Artificial Sequence: Synthetic peptide
  MOD_RES (4)..(4): phosphorylated serine
RLRSPPPVSK

SEQ ID NO: 1340 - protein, 9 aa, Artificial Sequence
  Description of Artificial Sequence: Synthetic peptide
  MOD_RES (4)..(4): phosphorylated serine
RLRSYEDMI

SEQ ID NO: 1341 - protein, 10 aa, Artificial Sequence
  Description of Artificial Sequence: Synthetic peptide
  MOD_RES (5)..(5): phosphorylated serine
RLRTSPITRK

SEQ ID NO: 1342 - protein, 10 aa, Artificial Sequence
  Description of Artificial Sequence: Synthetic peptide
  MOD_RES (5)..(5): phosphorylated serine
RLRTSPITRR

SEQ ID NO: 1343 - protein, 9 aa, Artificial Sequence
  Description of Artificial Sequence: Synthetic peptide
  MOD_RES (5)..(5): phosphorylated threonine
RLSDTPPLL

SEQ ID NO: 1344 - protein, 9 aa, Artificial Sequence
  Description of Artificial Sequence: Synthetic peptide
  MOD_RES (4)..(4): phosphorylated serine
RLSSLIRHK

SEQ ID NO: 1345 - protein, 11 aa, Artificial Sequence
  Description of Artificial Sequence: Synthetic peptide
  MOD_RES (4)..(4): phosphorylated serine
RLSSLRASTSK

SEQ ID NO: 1346 - protein, 9 aa, Artificial Sequence
  Description of Artificial Sequence: Synthetic peptide
  MOD_RES (4)..(4): phosphorylated serine
RLSSPISKK

SEQ ID NO: 1347 - protein, 9 aa, Artificial Sequence
  Description of Artificial Sequence: Synthetic peptide
  MOD_RES (4)..(4): phosphorylated serine
RLSSPISKR

SEQ ID NO: 1348 - protein, 9 aa, Artificial Sequence
  Description of Artificial Sequence: Synthetic peptide
  MOD_RES (4)..(4): phosphorylated serine
RLSSPISKY

SEQ ID NO: 1349 - protein, 9 aa, Artificial Sequence
  Description of Artificial Sequence: Synthetic peptide
  MOD_RES (3)..(3): phosphorylated serine
RLSSPLHFV

SEQ ID NO: 1350 - protein, 9 aa, Artificial Sequence
  Description of Artificial Sequence: Synthetic peptide
  MOD_RES (4)..(4): phosphorylated serine
RLSSPLHFV

SEQ ID NO: 1351 - protein, 9 aa, Artificial Sequence
  Description of Artificial Sequence: Synthetic peptide
  MOD_RES (4)..(4): phosphorylated serine
RLSSPVLHK

SEQ ID NO: 1352 - protein, 9 aa, Artificial Sequence
  Description of Artificial Sequence: Synthetic peptide
  MOD_RES (4)..(4): phosphorylated serine
RLSSPVLHR

SEQ ID NO: 1353 - protein, 9 aa, Artificial Sequence
  Description of Artificial Sequence: Synthetic peptide
  MOD_RES (4)..(4): phosphorylated serine
RLSSPVLHY

SEQ ID NO: 1354 - protein, 9 aa, Artificial Sequence
  Description of Artificial Sequence: Synthetic peptide
  MOD_RES (4)..(4): phosphorylated serine
RLSSRFSSK

SEQ ID NO: 1355 - protein, 9 aa, Artificial Sequence
  Description of Artificial Sequence: Synthetic peptide
  MOD_RES (4)..(4): phosphorylated serine
RLSSRFSSR

SEQ ID NO: 1356 - protein, 9 aa, Artificial Sequence
  Description of Artificial Sequence: Synthetic peptide
  MOD_RES (4)..(4): phosphorylated serine
RLSSRFSSY

SEQ ID NO: 1357 - protein, 9 aa, Artificial Sequence
  Description of Artificial Sequence: Synthetic peptide
  MOD_RES (4)..(4): phosphorylated serine
RLSSRYSQK

SEQ ID NO: 1358 - protein, 9 aa, Artificial Sequence
  Description of Artificial Sequence: Synthetic peptide
  MOD_RES (4)..(4): phosphorylated serine
RLSSRYSQY

SEQ ID NO: 1359 - protein, 10 aa, Artificial Sequence
  Description of Artificial Sequence: Synthetic peptide
  MOD_RES (4)..(4): phosphorylated serine
RLSSVKLISK

SEQ ID NO: 1360 - protein, 10 aa, Artificial Sequence
  Description of Artificial Sequence: Synthetic peptide
  MOD_RES (4)..(4): phosphorylated serine
RLSSVKLISY

SEQ ID NO: 1361 - protein, 10 aa, Artificial Sequence
  Description of Artificial Sequence: Synthetic peptide
  MOD_RES (5)..(5): phosphorylated serine
RLTFSPTYGV

SEQ ID NO: 1362 - protein, 9 aa, Artificial Sequence
  Description of Artificial Sequence: Synthetic peptide
  MOD_RES (4)..(4): phosphorylated serine
RLVSLSMRK

SEQ ID NO: 1363 - protein, 9 aa, Artificial Sequence
  Description of Artificial Sequence: Synthetic peptide
  MOD_RES (4)..(4): phosphorylated serine
RLVSLSMRY

SEQ ID NO: 1364 - protein, 9 aa, Artificial Sequence
  Description of Artificial Sequence: Synthetic peptide
  MOD_RES (5)..(5): phosphorylated serine
RLYKSPLRH

SEQ ID NO: 1365 - protein, 9 aa, Artificial Sequence
  Description of Artificial Sequence: Synthetic peptide
  MOD_RES (5)..(5): phosphorylated serine
RLYKSPLRK

SEQ ID NO: 1366 - protein, 9 aa, Artificial Sequence
  Description of Artificial Sequence: Synthetic peptide
  MOD_RES (5)..(5): phosphorylated tyrosine
RLYQYIQSK

SEQ ID NO: 1367 - protein, 9 aa, Artificial Sequence
  Description of Artificial Sequence: Synthetic peptide
  MOD_RES (5)..(5): phosphorylated tyrosine
RLYQYIQSR

SEQ ID NO: 1368 - protein, 11 aa, Artificial Sequence
  Description of Artificial Sequence: Synthetic peptide
  MOD_RES (5)..(5): phosphorylated tyrosine
RLYQYIQSRFK

SEQ ID NO: 1369 - protein, 11 aa, Artificial Sequence
  Description of Artificial Sequence: Synthetic peptide
  MOD_RES (5)..(5): phosphorylated tyrosine
RLYQYIQSRFY

SEQ ID NO: 1370 - protein, 9 aa, Artificial Sequence
  Description of Artificial Sequence: Synthetic peptide
  MOD_RES (5)..(5): phosphorylated tyrosine
RLYQYIQSY

SEQ ID NO: 1371 - protein, 9 aa, Artificial Sequence
  Description of Artificial Sequence: Synthetic peptide
  MOD_RES (5)..(5): phosphorylated tyrosine
RLYQYLQSK

SEQ ID NO: 1372 - protein, 10 aa, Artificial Sequence
  Description of Artificial Sequence: Synthetic peptide
  MOD_RES (5)..(5): phosphorylated tyrosine
RLYQYLQSRF

SEQ ID NO: 1373 - protein, 11 aa, Artificial Sequence
  Description of Artificial Sequence: Synthetic peptide
  MOD_RES (5)..(5): phosphorylated tyrosine
RLYQYLQSRFK

SEQ ID NO: 1374 - protein, 11 aa, Artificial Sequence
  Description of Artificial Sequence: Synthetic peptide
  MOD_RES (5)..(5): phosphorylated tyrosine
RLYQYLQSRFY

SEQ ID NO: 1375 - protein, 10 aa, Artificial Sequence
  Description of Artificial Sequence: Synthetic peptide
  MOD_RES (5)..(5): phosphorylated tyrosine
RLYQYLQSRK

SEQ ID NO: 1376 - protein, 10 aa, Artificial Sequence
  Description of Artificial Sequence: Synthetic peptide
  MOD_RES (4)..(4): phosphorylated serine
RLYSGPMNKV

SEQ ID NO: 1377 - protein, 9 aa, Artificial Sequence
  Description of Artificial Sequence: Synthetic peptide
  MOD_RES (4)..(4): phosphorylated serine
  MOD_RES (8)..(8): phosphorylated serine
RLYSGSRSK

SEQ ID NO: 1378 - protein, 9 aa, Artificial Sequence
  Description of Artificial Sequence: Synthetic peptide
  MOD_RES (4)..(4): phosphorylated serine
  MOD_RES (8)..(8): phosphorylated serine
RLYSGSRSR

SEQ ID NO: 1379 - protein, 9 aa, Artificial Sequence
  Description of Artificial Sequence: Synthetic peptide
  MOD_RES (4)..(4): phosphorylated serine
  MOD_RES (8)..(8): phosphorylated serine
RLYSGSRSY

SEQ ID NO: 1380 - protein, 9 aa, Artificial Sequence
  Description of Artificial Sequence: Synthetic peptide
  MOD_RES (4)..(4): phosphorylated serine
RLYSKSRDK

SEQ ID NO: 1381 - protein, 10 aa, Artificial Sequence
  Description of Artificial Sequence: Synthetic peptide
  MOD_RES (4)..(4): phosphorylated serine
RLYSPDHRQK

SEQ ID NO: 1382 - protein, 9 aa, Artificial Sequence
  Description of Artificial Sequence: Synthetic peptide
  MOD_RES (4)..(4): phosphorylated serine
RLYSPERSK

SEQ ID NO: 1383 - protein, 9 aa, Artificial Sequence
  Description of Artificial Sequence: Synthetic peptide
  MOD_RES (4)..(4): phosphorylated serine
RLYSPRNSK

SEQ ID NO: 1384 - protein, 9 aa, Artificial Sequence
  Description of Artificial Sequence: Synthetic peptide
  MOD_RES (4)..(4): phosphorylated serine
RLYSPYNHK

SEQ ID NO: 1385 - protein, 9 aa, Artificial Sequence
  Description of Artificial Sequence: Synthetic peptide
  MOD_RES (4)..(4): phosphorylated serine
RLYSPYNHR

SEQ ID NO: 1386 - protein, 9 aa, Artificial Sequence
  Description of Artificial Sequence: Synthetic peptide
  MOD_RES (4)..(4): phosphorylated serine
RLYSPYNHY

SEQ ID NO: 1387 - protein, 9 aa, Artificial Sequence
  Description of Artificial Sequence: Synthetic peptide
  MOD_RES (6)..(6): phosphorylated serine
RLYSRSFSK

SEQ ID NO: 1388 - protein, 9 aa, Artificial Sequence
  Description of Artificial Sequence: Synthetic peptide
  MOD_RES (6)..(6): phosphorylated serine
RLYSRSFSY

SEQ ID NO: 1389 - protein, 9 aa, Artificial Sequence
  Description of Artificial Sequence: Synthetic peptide
  MOD_RES (4)..(4): phosphorylated serine
RLYSYPRQK

SEQ ID NO: 1390 - protein, 14 aa, Artificial Sequence
  Description of Artificial Sequence: Synthetic peptide
  MOD_RES (12)..(12): phosphorylated serine
RLYVTTSTRTYSLG

SEQ ID NO: 1391 - protein, 14 aa, Artificial Sequence
  Description of Artificial Sequence: Synthetic peptide
  MOD_RES (12)..(12): phosphorylated serine
RLYVTTSTRTYSLK

SEQ ID NO: 1392 - protein, 14 aa, Artificial Sequence
  Description of Artificial Sequence: Synthetic peptide
  MOD_RES (12)..(12): phosphorylated serine
RLYVTTSTRTYSLY

SEQ ID NO: 1393 - protein, 10 aa, Artificial Sequence
  Description of Artificial Sequence: Synthetic peptide
  MOD_RES (4)..(4): phosphorylated serine
RMASPPPPPK

SEQ ID NO: 1394 - protein, 9 aa, Artificial Sequence
  Description of Artificial Sequence: Synthetic peptide
  MOD_RES (4)..(4): phosphorylated serine
RMASPTSGV

SEQ ID NO: 1395 - protein, 10 aa, Artificial Sequence
  Description of Artificial Sequence: Synthetic peptide
  MOD_RES (4)..(4): phosphorylated serine
RMASPTSGVK

SEQ ID NO: 1396 - protein, 11 aa, Artificial Sequence
  Description of Artificial Sequence: Synthetic peptide
  MOD_RES (4)..(4): phosphorylated serine
RMASPTSGVKK

SEQ ID NO: 1397 - protein, 11 aa, Artificial Sequence
  Description of Artificial Sequence: Synthetic peptide
  MOD_RES (4)..(4): phosphorylated serine
RMASPTSGVKR

SEQ ID NO: 1398 - protein, 11 aa, Artificial Sequence
  Description of Artificial Sequence: Synthetic peptide
  MOD_RES (4)..(4): phosphorylated serine
RMASPTSGVKY

SEQ ID NO: 1399 - protein, 11 aa, Artificial Sequence
  Description of Artificial Sequence: Synthetic peptide
  MOD_RES (4)..(4): phosphorylated serine
RMASSATQVHK

SEQ ID NO: 1400 - protein, 11 aa, Artificial Sequence
  Description of Artificial Sequence: Synthetic peptide
  MOD_RES (4)..(4): phosphorylated serine
RMDSTPGKVFL

SEQ ID NO: 1401 - protein, 11 aa, Artificial Sequence
  Description of Artificial Sequence: Synthetic peptide
  MOD_RES (4)..(4): phosphorylated serine
RMDSTPGKVFV

SEQ ID NO: 1402 - protein, 9 aa, Artificial Sequence
  Description of Artificial Sequence: Synthetic peptide
  MOD_RES (4)..(4): phosphorylated serine
RMDSYVRSL

SEQ ID NO: 1403 - protein, 9 aa, Artificial Sequence
  Description of Artificial Sequence: Synthetic peptide
  MOD_RES (4)..(4): phosphorylated serine
RMDSYVRSV

SEQ ID NO: 1404 - protein, 9 aa, Artificial Sequence
  Description of Artificial Sequence: Synthetic peptide
  MOD_RES (5)..(5): phosphorylated threonine
RMFPTPPSL

SEQ ID NO: 1405 - protein, 10 aa, Artificial Sequence
  Description of Artificial Sequence: Synthetic peptide
  MOD_RES (4)..(4): phosphorylated serine
RMFSFSKTPK

SEQ ID NO: 1406 - protein, 9 aa, Artificial Sequence
  Description of Artificial Sequence: Synthetic peptide
  MOD_RES (4)..(4): phosphorylated serine
RMFSKELRC

SEQ ID NO: 1407 - protein, 9 aa, Artificial Sequence
  Description of Artificial Sequence: Synthetic peptide
  MOD_RES (4)..(4): phosphorylated serine
RMFSKELRV

SEQ ID NO: 1408 - protein, 9 aa, Artificial Sequence
  Description of Artificial Sequence: Synthetic peptide
  MOD_RES (4)..(4): phosphorylated serine
RMFSPMEEK

SEQ ID NO: 1409 - protein, 12 aa, Artificial Sequence
  Description of Artificial Sequence: Synthetic peptide
  MOD_RES (4)..(4): phosphorylated serine
RMFSPMEEKELL

SEQ ID NO: 1410 - protein, 9 aa, Artificial Sequence
  Description of Artificial Sequence: Synthetic peptide
  MOD_RES (4)..(4): phosphorylated serine
RMFSPTYGL

SEQ ID NO: 1411 - protein, 9 aa, Artificial Sequence
  Description of Artificial Sequence: Synthetic peptide
  MOD_RES (4)..(4): phosphorylated serine
RMFSPTYGV

SEQ ID NO: 1412 - protein, 9 aa, Artificial Sequence
  Description of Artificial Sequence: Synthetic peptide
  MOD_RES (4)..(4): phosphorylated serine
RMISPYKKK

SEQ ID NO: 1413 - protein, 9 aa, Artificial Sequence
  Description of Artificial Sequence: Synthetic peptide
  MOD_RES (4)..(4): phosphorylated serine
RMISQDVKL

SEQ ID NO: 1414 - protein, 9 aa, Artificial Sequence
  Description of Artificial Sequence: Synthetic peptide
  MOD_RES (4)..(4): phosphorylated serine
RMISQDVKV

SEQ ID NO: 1415 - protein, 9 aa, Artificial Sequence
  Description of Artificial Sequence: Synthetic peptide
  MOD_RES (4)..(4): phosphorylated serine
RMISTGSEL

SEQ ID NO: 1416 - protein, 9 aa, Artificial Sequence
  Description of Artificial Sequence: Synthetic peptide
  MOD_RES (6)..(6): phosphorylated serine
RMKLPSGSK

SEQ ID NO: 1417 - protein, 10 aa, Artificial Sequence
  Description of Artificial Sequence: Synthetic peptide
  MOD_RES (6)..(6): phosphorylated serine
RMKLPSGSKK

SEQ ID NO: 1418 - protein, 10 aa, Artificial Sequence
  Description of Artificial Sequence: Synthetic peptide
  MOD_RES (6)..(6): phosphorylated serine
RMKLPSGSKY

SEQ ID NO: 1419 - protein, 9 aa, Artificial Sequence
  Description of Artificial Sequence: Synthetic peptide
  MOD_RES (4)..(4): phosphorylated serine
RMKSPFRKK

SEQ ID NO: 1420 - protein, 11 aa, Artificial Sequence
  Description of Artificial Sequence: Synthetic peptide
  MOD_RES (4)..(4): phosphorylated serine
  MOD_RES (7)..(7): phosphorylated serine
RMKSPGSGHVK

SEQ ID NO: 1421 - protein, 11 aa, Artificial Sequence
  Description of Artificial Sequence: Synthetic peptide
  MOD_RES (4)..(4): phosphorylated serine
RMKSPSPKSEK

SEQ ID NO: 1422 - protein, 11 aa, Artificial Sequence
  Description of Artificial Sequence: Synthetic peptide
  MOD_RES (4)..(4): phosphorylated threonine
RMKTPTSQSYK

SEQ ID NO: 1423 - protein, 11 aa, Artificial Sequence
  Description of Artificial Sequence: Synthetic peptide
  MOD_RES (4)..(4): phosphorylated threonine
RMKTPTSQSYR

SEQ ID NO: 1424 - protein, 9 aa, Artificial Sequence
  Description of Artificial Sequence: Synthetic peptide
  MOD_RES (5)..(5): phosphorylated threonine
RMKTTPLRK

SEQ ID NO: 1425 - protein, 9 aa, Artificial Sequence
  Description of Artificial Sequence: Synthetic peptide
  MOD_RES (5)..(5): phosphorylated threonine
RMKTTPLRR

SEQ ID NO: 1426 - protein, 12 aa, Artificial Sequence
  Description of Artificial Sequence: Synthetic peptide
  MOD_RES (8)..(8): phosphorylated serine
RMLDRSPSRSAK

SEQ ID NO: 1427 - protein, 12 aa, Artificial Sequence
  Description of Artificial Sequence: Synthetic peptide
  MOD_RES (8)..(8): phosphorylated serine
RMLDRSPSRSAY

SEQ ID NO: 1428 - protein, 9 aa, Artificial Sequence
  Description of Artificial Sequence: Synthetic peptide
  MOD_RES (4)..(4): phosphorylated serine
RMLSHISEA

SEQ ID NO: 1429 - protein, 9 aa, Artificial Sequence
  Description of Artificial Sequence: Synthetic peptide
  MOD_RES (4)..(4): phosphorylated serine
RMLSHISEV

SEQ ID NO: 1430 - protein, 10 aa, Artificial Sequence
  Description of Artificial Sequence: Synthetic peptide
  MOD_RES (4)..(4): phosphorylated serine
RMLSLRDQRL

SEQ ID NO: 1431 - protein, 9 aa, Artificial Sequence
  Description of Artificial Sequence: Synthetic peptide
  MOD_RES (4)..(4): phosphorylated serine
RMLSPLSSA

SEQ ID NO: 1432 - protein, 9 aa, Artificial Sequence
  Description of Artificial Sequence: Synthetic peptide
  MOD_RES (4)..(4): phosphorylated serine
RMLSPLSSV

SEQ ID NO: 1433 - protein, 10 aa, Artificial Sequence
  Description of Artificial Sequence: Synthetic peptide
  MOD_RES (4)..(4): phosphorylated serine
RMLSPSMASK

SEQ ID NO: 1434 - protein, 10 aa, Artificial Sequence
  Description of Artificial Sequence: Synthetic peptide
  MOD_RES (4)..(4): phosphorylated serine
RMLSSGVSEI

SEQ ID NO: 1435 - protein, 10 aa, Artificial Sequence
  Description of Artificial Sequence: Synthetic peptide
  MOD_RES (4)..(4): phosphorylated serine
RMLSSGVSEV

SEQ ID NO: 1436 - protein, 9 aa, Artificial Sequence
  Description of Artificial Sequence: Synthetic peptide
  MOD_RES (4)..(4): phosphorylated serine
RMLSVILIK

SEQ ID NO: 1437 - protein, 10 aa, Artificial Sequence
  Description of Artificial Sequence: Synthetic peptide
  MOD_RES (4)..(4): phosphorylated serine
RMPSFLKKNK

SEQ ID NO: 1438 - protein, 9 aa, Artificial Sequence
  Description of Artificial Sequence: Synthetic peptide
  MOD_RES (4)..(4): phosphorylated serine
RMPSSTLKK

SEQ ID NO: 1439 - protein, 9 aa, Artificial Sequence
  Description of Artificial Sequence: Synthetic peptide
  MOD_RES (4)..(4): phosphorylated serine
RMPSSTLKR

SEQ ID NO: 1440 - protein, 9 aa, Artificial Sequence
  Description of Artificial Sequence: Synthetic peptide
  MOD_RES (4)..(4): phosphorylated serine
RMQSTSERL

SEQ ID NO: 1441 - protein, 9 aa, Artificial Sequence
  Description of Artificial Sequence: Synthetic peptide
  MOD_RES (4)..(4): phosphorylated serine
RMQSTSERV

SEQ ID NO: 1442 - protein, 10 aa, Artificial Sequence
  Description of Artificial Sequence: Synthetic peptide
  MOD_RES (5)..(5): phosphorylated serine
RMRQSPLATK

SEQ ID NO: 1443 - protein, 10 aa, Artificial Sequence
  Description of Artificial Sequence: Synthetic peptide
  MOD_RES (5)..(5): phosphorylated serine
RMRQSPLATR

SEQ ID NO: 1444 - protein, 9 aa, Artificial Sequence
  Description of Artificial Sequence: Synthetic peptide
  MOD_RES (5)..(5): phosphorylated serine
RMRRSPLLK

SEQ ID NO: 1445 - protein, 10 aa, Artificial Sequence
  Description of Artificial Sequence: Synthetic peptide
  MOD_RES (4)..(4): phosphorylated serine
RMRSAGAAQK

SEQ ID NO: 1446 - protein, 11 aa, Artificial Sequence
  Description of Artificial Sequence: Synthetic peptide
  MOD_RES (4)..(4): phosphorylated serine
RMRSLSSLREK

SEQ ID NO: 1447 - protein, 10 aa, Artificial Sequence
  Description of Artificial Sequence: Synthetic peptide
  MOD_RES (4)..(4): phosphorylated serine
RMRSPPPVSK

SEQ ID NO: 1448 - protein, 10 aa, Artificial Sequence
  Description of Artificial Sequence: Synthetic peptide
  MOD_RES (5)..(5): phosphorylated serine
RMRTSPITRK

SEQ ID NO: 1449 - protein, 10 aa, Artificial Sequence
  Description of Artificial Sequence: Synthetic peptide
  MOD_RES (5)..(5): phosphorylated serine
RMRTSPITRR

SEQ ID NO: 1450 - protein, 9 aa, Artificial Sequence
  Description of Artificial Sequence: Synthetic peptide
  MOD_RES (4)..(4): phosphorylated serine
RMSSLIRHK

SEQ ID NO: 1451 - protein, 9 aa, Artificial Sequence
  Description of Artificial Sequence: Synthetic peptide
  MOD_RES (4)..(4): phosphorylated serine
RMSSPISKK

SEQ ID NO: 1452 - protein, 9 aa, Artificial Sequence
  Description of Artificial Sequence: Synthetic peptide
  MOD_RES (4)..(4): phosphorylated serine
RMSSPISKR

SEQ ID NO: 1453 - protein, 9 aa, Artificial Sequence
  Description of Artificial Sequence: Synthetic peptide
  MOD_RES (4)..(4): phosphorylated serine
RMSSPLHFV

SEQ ID NO: 1454 - protein, 9 aa, Artificial Sequence
  Description of Artificial Sequence: Synthetic peptide
  MOD_RES (4)..(4): phosphorylated serine
RMSSPVLHK

SEQ ID NO: 1455 - protein, 9 aa, Artificial Sequence
  Description of Artificial Sequence: Synthetic peptide
  MOD_RES (4)..(4): phosphorylated serine
RMSSRYSQK

SEQ ID NO: 1456 - protein, 10 aa, Artificial Sequence
  Description of Artificial Sequence: Synthetic peptide
  MOD_RES (4)..(4): phosphorylated serine
RMSSVKLISK

SEQ ID NO: 1457 - protein, 10 aa, Artificial Sequence
  Description of Artificial Sequence: Synthetic peptide
  MOD_RES (4)..(4): phosphorylated serine
RMSSVKLISY

SEQ ID NO: 1458 - protein, 9 aa, Artificial Sequence
  Description of Artificial Sequence: Synthetic peptide
  MOD_RES (4)..(4): phosphorylated serine
RMVSLSMRK

SEQ ID NO: 1459 - protein, 9 aa, Artificial Sequence
  Description of Artificial Sequence: Synthetic peptide
  MOD_RES (4)..(4): phosphorylated serine
RMVSLSMRY

SEQ ID NO: 1460 - protein, 9 aa, Artificial Sequence
  Description of Artificial Sequence: Synthetic peptide
  MOD_RES (5)..(5): phosphorylated serine
RMYKSPLRH

SEQ ID NO: 1461 - protein, 9 aa, Artificial Sequence
  Description of Artificial Sequence: Synthetic peptide
  MOD_RES (5)..(5): phosphorylated serine
RMYKSPLRK

SEQ ID NO: 1462 - protein, 9 aa, Artificial Sequence
  Description of Artificial Sequence: Synthetic peptide
  MOD_RES (5)..(5): phosphorylated tyrosine
RMYQYIQSK

SEQ ID NO: 1463 - protein, 9 aa, Artificial Sequence
  Description of Artificial Sequence: Synthetic peptide
  MOD_RES (5)..(5): phosphorylated tyrosine
RMYQYIQSR

SEQ ID NO: 1464 - protein, 10 aa, Artificial Sequence
  Description of Artificial Sequence: Synthetic peptide
  MOD_RES (5)..(5): phosphorylated tyrosine
RMYQYLQSRF

SEQ ID NO: 1465 - protein, 11 aa, Artificial Sequence
  Description of Artificial Sequence: Synthetic peptide
  MOD_RES (5)..(5): phosphorylated tyrosine
RMYQYLQSRFK

SEQ ID NO: 1466 - protein, 11 aa, Artificial Sequence
  Description of Artificial Sequence: Synthetic peptide
  MOD_RES (5)..(5): phosphorylated tyrosine
RMYQYLQSRFY

SEQ ID NO: 1467 - protein, 10 aa, Artificial Sequence
  Description of Artificial Sequence: Synthetic peptide
  MOD_RES (5)..(5): phosphorylated tyrosine
RMYQYLQSRK

SEQ ID NO: 1468 - protein, 9 aa, Artificial Sequence
  Description of Artificial Sequence: Synthetic peptide
  MOD_RES (4)..(4): phosphorylated serine
RMYSFDDVL

SEQ ID NO: 1469 - protein, 9 aa, Artificial Sequence
  Description of Artificial Sequence: Synthetic peptide
  MOD_RES (4)..(4): phosphorylated serine
  MOD_RES (8)..(8): phosphorylated serine
RMYSGSRSK

SEQ ID NO: 1470 - protein, 9 aa, Artificial Sequence
  Description of Artificial Sequence: Synthetic peptide
  MOD_RES (4)..(4): phosphorylated serine
  MOD_RES (8)..(8): phosphorylated serine
RMYSGSRSR

SEQ ID NO: 1471 - protein, 9 aa, Artificial Sequence
  Description of Artificial Sequence: Synthetic peptide
  MOD_RES (4)..(4): phosphorylated serine
RMYSKSRDH

SEQ ID NO: 1472 - protein, 9 aa, Artificial Sequence
  Description of Artificial Sequence: Synthetic peptide
  MOD_RES (4)..(4): phosphorylated serine
RMYSKSRDK

SEQ ID NO: 1473 - protein, 9 aa, Artificial Sequence
  Description of Artificial Sequence: Synthetic peptide
  MOD_RES (4)..(4): phosphorylated serine
RMYSKSRDY

SEQ ID NO: 1474 - protein, 10 aa, Artificial Sequence
  Description of Artificial Sequence: Synthetic peptide
  MOD_RES (4)..(4): phosphorylated serine
RMYSPDHRQK

SEQ ID NO: 1475 - protein, 9 aa, Artificial Sequence
  Description of Artificial Sequence: Synthetic peptide
  MOD_RES (4)..(4): phosphorylated serine
RMYSPERSK

SEQ ID NO: 1476 - protein, 10 aa, Artificial Sequence
  Description of Artificial Sequence: Synthetic peptide
  MOD_RES (4)..(4): phosphorylated serine
RMYSPIIYQA

SEQ ID NO: 1477 - protein, 10 aa, Artificial Sequence
  Description of Artificial Sequence: Synthetic peptide
  MOD_RES (4)..(4): phosphorylated serine
RMYSPIPPSL

SEQ ID NO: 1478 - protein, 9 aa, Artificial Sequence
  Description of Artificial Sequence: Synthetic peptide
  MOD_RES (4)..(4): phosphorylated serine
RMYSPRNSK

SEQ ID NO: 1479 - protein, 9 aa, Artificial Sequence
  Description of Artificial Sequence: Synthetic peptide
  MOD_RES (4)..(4): phosphorylated serine
RMYSPYNHK

SEQ ID NO: 1480 - protein, 9 aa, Artificial Sequence
  Description of Artificial Sequence: Synthetic peptide
  MOD_RES (4)..(4): phosphorylated serine
RMYSPYNHR

SEQ ID NO: 1481 - protein, 9 aa, Artificial Sequence
  Description of Artificial Sequence: Synthetic peptide
  MOD_RES (4)..(4): phosphorylated serine
RMYSYPRQK

SEQ ID NO: 1482 - protein, 14 aa, Artificial Sequence
  Description of Artificial Sequence: Synthetic peptide
  MOD_RES (12)..(12): phosphorylated serine
RMYVTTSTRTYSLG

SEQ ID NO: 1483 - protein, 14 aa, Artificial Sequence
  Description of Artificial Sequence: Synthetic peptide
  MOD_RES (12)..(12): phosphorylated serine
RMYVTTSTRTYSLK

SEQ ID NO: 1484 - protein, 14 aa, Artificial Sequence
  Description of Artificial Sequence: Synthetic peptide
  MOD_RES (12)..(12): phosphorylated serine
RMYVTTSTRTYSLY

SEQ ID NO: 1485 - protein, 9 aa, Artificial Sequence
  Description of Artificial Sequence: Synthetic peptide
  MOD_RES (4)..(4): phosphorylated serine
RNLSSPFIF

SEQ ID NO: 1486 - protein, 9 aa, Artificial Sequence
  Description of Artificial Sequence: Synthetic peptide
  MOD_RES (6)..(6): phosphorylated serine
RPAFFSPSL

SEQ ID NO: 1487 - protein, 9 aa, Artificial Sequence
  Description of Artificial Sequence: Synthetic peptide
  MOD_RES (5)..(5): phosphorylated serine
RPAKSMDSF

SEQ ID NO: 1488 - protein, 9 aa, Artificial Sequence
  Description of Artificial Sequence: Synthetic peptide
  MOD_RES (5)..(5): phosphorylated serine
RPAKSMDSL

SEQ ID NO: 1489 - protein, 9 aa, Artificial Sequence
  Description of Artificial Sequence: Synthetic peptide
  MOD_RES (5)..(5): phosphorylated serine
RPAKSMDSM

SEQ ID NO: 1490 - protein, 8 aa, Artificial Sequence
  Description of Artificial Sequence: Synthetic peptide
  MOD_RES (5)..(5): phosphorylated serine
RPAKSMDV

SEQ ID NO: 1491 - protein, 9 aa, Artificial Sequence
  Description of Artificial Sequence: Synthetic peptide
  MOD_RES (4)..(4): phosphorylated serine
RPASAGAMF

SEQ ID NO: 1492 - protein, 9 aa, Artificial Sequence
  Description of Artificial Sequence: Synthetic peptide
  MOD_RES (4)..(4): phosphorylated serine
  MOD_RES (8)..(8): oxidized methionine
RPASAGAML

SEQ ID NO: 1493 - protein, 9 aa, Artificial Sequence
  Description of Artificial Sequence: Synthetic peptide
  MOD_RES (4)..(4): phosphorylated serine
RPASAGAML

SEQ ID NO: 1494 - protein, 9 aa, Artificial Sequence
  Description of Artificial Sequence: Synthetic peptide
  MOD_RES (4)..(4): phosphorylated serine
RPASAGAMM

SEQ ID NO: 1495 - protein, 9 aa, Artificial Sequence
  Description of Artificial Sequence: Synthetic peptide
  MOD_RES (4)..(4): phosphorylated serine
RPASAGAMV

SEQ ID NO: 1496 - protein, 11 aa, Artificial Sequence
  Description of Artificial Sequence: Synthetic peptide
  MOD_RES (4)..(4): phosphorylated serine
RPASARAQPGF

SEQ ID NO: 1497 - protein, 11 aa, Artificial Sequence
  Description of Artificial Sequence: Synthetic peptide
  MOD_RES (4)..(4): phosphorylated serine
RPASARAQPGL

SEQ ID NO: 1498 - protein, 11 aa, Artificial Sequence
  Description of Artificial Sequence: Synthetic peptide
  MOD_RES (4)..(4): phosphorylated serine
RPASARAQPGM

SEQ ID NO: 1499 - protein, 11 aa, Artificial Sequence
  Description of Artificial Sequence: Synthetic peptide
  MOD_RES (4)..(4): phosphorylated serine
RPASARAQPGV

SEQ ID NO: 1500 - protein, 11 aa, Artificial Sequence
  Description of Artificial Sequence: Synthetic peptide
  MOD_RES (4)..(4): phosphorylated serine
RPASEARAPGL

SEQ ID NO: 1501 - protein, 9 aa, Artificial Sequence
  Description of Artificial Sequence: Synthetic peptide
  MOD_RES (4)..(4): phosphorylated serine
RPASPAAKF

SEQ ID NO: 1502 - protein, 9 aa, Artificial Sequence
  Description of Artificial Sequence: Synthetic peptide
  MOD_RES (4)..(4): phosphorylated serine
RPASPAAKL

SEQ ID NO: 1503 - protein, 9 aa, Artificial Sequence
  Description of Artificial Sequence: Synthetic peptide
  MOD_RES (4)..(4): phosphorylated serine
RPASPAAKM

SEQ ID NO: 1504 - protein, 9 aa, Artificial Sequence
  Description of Artificial Sequence: Synthetic peptide
  MOD_RES (4)..(4): phosphorylated serine
RPASPAAKV

SEQ ID NO: 1505 - protein, 9 aa, Artificial Sequence
  Description of Artificial Sequence: Synthetic peptide
  MOD_RES (4)..(4): phosphorylated serine
RPASPEPEL

SEQ ID NO: 1506 - protein, 9 aa, Artificial Sequence
  Description of Artificial Sequence: Synthetic peptide
  MOD_RES (4)..(4): phosphorylated serine
RPASPGPSL

SEQ ID NO: 1507 - protein, 10 aa, Artificial Sequence
  Description of Artificial Sequence: Synthetic peptide
  MOD_RES (4)..(4): phosphorylated serine
RPASPKRAKI

SEQ ID NO: 1508 - protein, 10 aa, Artificial Sequence
  Description of Artificial Sequence: Synthetic peptide
  MOD_RES (4)..(4): phosphorylated serine
RPASPKRAKL

SEQ ID NO: 1509 - protein, 10 aa, Artificial Sequence
  Description of Artificial Sequence: Synthetic peptide
  MOD_RES (4)..(4): phosphorylated serine
  MOD_RES (10)..(10): Any amino acid
RPASPKRAKX

SEQ ID NO: 1510 - protein, 10 aa, Artificial Sequence
  Description of Artificial Sequence: Synthetic peptide
  MOD_RES (4)..(4): phosphorylated serine
RPASPKRAQI

SEQ ID NO: 1511 - protein, 10 aa, Artificial Sequence
  Description of Artificial Sequence: Synthetic peptide
  MOD_RES (4)..(4): phosphorylated serine
RPASPKRAQL

SEQ ID NO: 1512 - protein, 10 aa, Artificial Sequence
  Description of Artificial Sequence: Synthetic peptide
  MOD_RES (4)..(4): phosphorylated serine
  MOD_RES (10)..(10): Any amino acid
RPASPKRAQX

SEQ ID NO: 1513 - protein, 10 aa, Artificial Sequence
  Description of Artificial Sequence: Synthetic peptide
  MOD_RES (4)..(4): phosphorylated serine
RPASPQRAKI

SEQ ID NO: 1514 - protein, 10 aa, Artificial Sequence
  Description of Artificial Sequence: Synthetic peptide
  MOD_RES (4)..(4): phosphorylated serine
RPASPQRAKL

SEQ ID NO: 1515 - protein, 10 aa, Artificial Sequence
  Description of Artificial Sequence: Synthetic peptide
  MOD_RES (4)..(4): phosphorylated serine
  MOD_RES (10)..(10): Any amino acid
RPASPQRAKX

SEQ ID NO: 1516 - protein, 10 aa, Artificial Sequence
  Description of Artificial Sequence: Synthetic peptide
  MOD_RES (4)..(4): phosphorylated serine
RPASPQRAQI

SEQ ID NO: 1517 - protein, 10 aa, Artificial Sequence
  Description of Artificial Sequence: Synthetic peptide
  MOD_RES (4)..(4): phosphorylated serine
RPASPQRAQL

SEQ ID NO: 1518 - protein, 10 aa, Artificial Sequence
  Description of Artificial Sequence: Synthetic peptide
  MOD_RES (4)..(4): phosphorylated serine
  MOD_RES (10)..(10): Any amino acid
RPASPQRAQX

SEQ ID NO: 1519 - protein, 9 aa, Artificial Sequence
  Description of Artificial Sequence: Synthetic peptide
  MOD_RES (4)..(4): phosphorylated serine
RPASPSLQL

SEQ ID NO: 1520 - protein, 10 aa, Artificial Sequence
  Description of Artificial Sequence: Synthetic peptide
  MOD_RES (4)..(4): phosphorylated serine
RPASPSLQLL

SEQ ID NO: 1521 - protein, 19 aa, Artificial Sequence
  Description of Artificial Sequence: Synthetic peptide
  MOD_RES (4)..(4): phosphorylated serine
  MOD_RES (6)..(6): phosphorylated threonine
RPASPTAIRRIGSVTSRQT

SEQ ID NO: 1522 - protein, 9 aa, Artificial Sequence
  Description of Artificial Sequence: Synthetic peptide
  MOD_RES (4)..(4): phosphorylated serine
RPASRFEVL

SEQ ID NO: 1523 - protein, 11 aa, Artificial Sequence
  Description of Artificial Sequence: Synthetic peptide
  MOD_RES (4)..(4): phosphorylated serine
RPASYKKKSML

SEQ ID NO: 1524 - protein, 10 aa, Artificial Sequence
  Description of Artificial Sequence: Synthetic peptide
  MOD_RES (4)..(4): phosphorylated threonine
RPATGGPGVA

SEQ ID NO: 1525 - protein, 10 aa, Artificial Sequence
  Description of Artificial Sequence: Synthetic peptide
  MOD_RES (4)..(4): phosphorylated threonine
RPATGGPGVF

SEQ ID NO: 1526 - protein, 10 aa, Artificial Sequence
  Description of Artificial Sequence: Synthetic peptide
  MOD_RES (4)..(4): phosphorylated threonine
RPATGGPGVL

SEQ ID NO: 1527 - protein, 10 aa, Artificial Sequence
  Description of Artificial Sequence: Synthetic peptide
  MOD_RES (4)..(4): phosphorylated threonine
RPATGGPGVM

SEQ ID NO: 1528 - protein, 10 aa, Artificial Sequence
  Description of Artificial Sequence: Synthetic peptide
  MOD_RES (4)..(4): phosphorylated threonine
RPATGGPGVV

SEQ ID NO: 1529 - protein, 9 aa, Artificial Sequence
  Description of Artificial Sequence: Synthetic peptide
  MOD_RES (4)..(4): phosphorylated threonine
RPATPTSQF

SEQ ID NO: 1530 - protein, 9 aa, Artificial Sequence
  Description of Artificial Sequence: Synthetic peptide
  MOD_RES (4)..(4): phosphorylated threonine
RPATPTSQL

SEQ ID NO: 1531 - protein, 9 aa, Artificial Sequence
  Description of Artificial Sequence: Synthetic peptide
  MOD_RES (4)..(4): phosphorylated threonine
RPATPTSQM

SEQ ID NO: 1532 - protein, 9 aa, Artificial Sequence
  Description of Artificial Sequence: Synthetic peptide
  MOD_RES (4)..(4): phosphorylated threonine
RPATPTSQV

SEQ ID NO: 1533 - protein, 9 aa, Artificial Sequence
  Description of Artificial Sequence: Synthetic peptide
  MOD_RES (4)..(4): phosphorylated serine
RPDSAHKML

SEQ ID NO: 1534 - protein, 10 aa, Artificial Sequence
  Description of Artificial Sequence: Synthetic peptide
  MOD_RES (4)..(4): phosphorylated serine
RPDSPTRPTL

SEQ ID NO: 1535 - protein, 11 aa, Artificial Sequence
  Description of Artificial Sequence: Synthetic peptide
  MOD_RES (4)..(4): phosphorylated serine
RPDSRLGKTEF

SEQ ID NO: 1536 - protein, 11 aa, Artificial Sequence
  Description of Artificial Sequence: Synthetic peptide
  MOD_RES (4)..(4): phosphorylated serine
RPDSRLGKTEL

SEQ ID NO: 1537 - protein, 11 aa, Artificial Sequence
  Description of Artificial Sequence: Synthetic peptide
  MOD_RES (4)..(4): phosphorylated serine
RPDSRLGKTEM

SEQ ID NO: 1538 - protein, 11 aa, Artificial Sequence
  Description of Artificial Sequence: Synthetic peptide
  MOD_RES (4)..(4): phosphorylated serine
RPDSRLGKTEV

SEQ ID NO: 1539 - protein, 10 aa, Artificial Sequence
  Description of Artificial Sequence: Synthetic peptide
  MOD_RES (9)..(9): phosphorylated serine
RPDVAKRLSL

SEQ ID NO: 1540 - protein, 10 aa, Artificial Sequence
  Description of Artificial Sequence: Synthetic peptide
  MOD_RES (4)..(4): phosphorylated serine
RPESDSGLKF

SEQ ID NO: 1541 - protein, 10 aa, Artificial Sequence
  Description of Artificial Sequence: Synthetic peptide
  MOD_RES (4)..(4): phosphorylated serine
RPESDSGLKL

SEQ ID NO: 1542 - protein, 10 aa, Artificial Sequence
  Description of Artificial Sequence: Synthetic peptide
  MOD_RES (4)..(4): phosphorylated serine
RPESDSGLKM

SEQ ID NO: 1543 - protein, 10 aa, Artificial Sequence
  Description of Artificial Sequence: Synthetic peptide
  MOD_RES (4)..(4): phosphorylated serine
RPESDSGLKV

SEQ ID NO: 1544 - protein, 9 aa, Artificial Sequence
  Description of Artificial Sequence: Synthetic peptide
  MOD_RES (4)..(4): phosphorylated serine
RPESKDRKF

SEQ ID NO: 1545 - protein, 9 aa, Artificial Sequence
  Description of Artificial Sequence: Synthetic peptide
  MOD_RES (4)..(4): phosphorylated serine
RPESKDRKL

SEQ ID NO: 1546 - protein, 9 aa, Artificial Sequence
  Description of Artificial Sequence: Synthetic peptide
  MOD_RES (4)..(4): phosphorylated serine
RPESKDRKM

SEQ ID NO: 1547 - protein, 9 aa, Artificial Sequence
  Description of Artificial Sequence: Synthetic peptide
  MOD_RES (4)..(4): phosphorylated serine
RPESKDRKV

SEQ ID NO: 1548 - protein, 9 aa, Artificial Sequence
  Description of Artificial Sequence: Synthetic peptide
  MOD_RES (6)..(6): phosphorylated serine
RPFARSHSF

SEQ ID NO: 1549 - protein, 9 aa, Artificial Sequence
  Description of Artificial Sequence: Synthetic peptide
  MOD_RES (8)..(8): phosphorylated serine
RPFARSHSF

SEQ ID NO: 1550 - protein, 11 aa, Artificial Sequence
  Description of Artificial Sequence: Synthetic peptide
  MOD_RES (10)..(10): phosphorylated serine
RPFHGISTVSL

SEQ ID NO: 1551 - protein, 9 aa, Artificial Sequence
  Description of Artificial Sequence: Synthetic peptide
  MOD_RES (4)..(4): phosphorylated serine
RPFSPREAF

SEQ ID NO: 1552 - protein, 9 aa, Artificial Sequence
  Description of Artificial Sequence: Synthetic peptide
  MOD_RES (4)..(4): phosphorylated serine
RPFSPREAL

SEQ ID NO: 1553 - protein, 9 aa, Artificial Sequence
  Description of Artificial Sequence: Synthetic peptide
  MOD_RES (4)..(4): phosphorylated serine
RPFSPREAM

SEQ ID NO: 1554 - protein, 9 aa, Artificial Sequence
  Description of Artificial Sequence: Synthetic peptide
  MOD_RES (4)..(4): phosphorylated serine
RPFSPREAV

SEQ ID NO: 1555 - protein, 9 aa, Artificial Sequence
  Description of Artificial Sequence: Synthetic peptide
  MOD_RES (4)..(4): phosphorylated serine
RPGSLERKF

SEQ ID NO: 1556 - protein, 9 aa, Artificial Sequence
  Description of Artificial Sequence: Synthetic peptide
  MOD_RES (4)..(4): phosphorylated serine
RPGSLERKL

SEQ ID NO: 1557 - protein, 9 aa, Artificial Sequence
  Description of Artificial Sequence: Synthetic peptide
  MOD_RES (4)..(4): phosphorylated serine
RPGSLERKM

SEQ ID NO: 1558 - protein, 9 aa, Artificial Sequence
  Description of Artificial Sequence: Synthetic peptide
  MOD_RES (4)..(4): phosphorylated serine
RPGSLERKV

SEQ ID NO: 1559 - protein, 9 aa, Artificial Sequence
  Description of Artificial Sequence: Synthetic peptide
  MOD_RES (4)..(4): phosphorylated serine
RPGSRQAGL

SEQ ID NO: 1560 - protein, 9 aa, Artificial Sequence
  Description of Artificial Sequence: Synthetic peptide
  MOD_RES (4)..(4): phosphorylated serine
RPGSRQAGL

SEQ ID NO: 1561 - protein, 9 aa, Artificial Sequence
  Description of Artificial Sequence: Synthetic peptide
  MOD_RES (4)..(4): phosphorylated serine
RPHSPEKAF

SEQ ID NO: 1562 - protein, 9 aa, Artificial Sequence
  Description of Artificial Sequence: Synthetic peptide
  MOD_RES (4)..(4): phosphorylated serine
RPHSPEKAL

SEQ ID NO: 1563 - protein, 9 aa, Artificial Sequence
  Description of Artificial Sequence: Synthetic peptide
  MOD_RES (4)..(4): phosphorylated serine
RPHSPEKAM

SEQ ID NO: 1564 - protein, 9 aa, Artificial Sequence
  Description of Artificial Sequence: Synthetic peptide
  MOD_RES (4)..(4): phosphorylated serine
RPHSPEKAV

SEQ ID NO: 1565 - protein, 10 aa, Artificial Sequence
  Description of Artificial Sequence: Synthetic peptide
  MOD_RES (4)..(4): phosphorylated threonine
RPHTPTGIYM

SEQ ID NO: 1566 - protein, 11 aa, Artificial Sequence
  Description of Artificial Sequence: Synthetic peptide
  MOD_RES (4)..(4): phosphorylated threonine
RPHTPTPGIYM

SEQ ID NO: 1567 - protein, 9 aa, Artificial Sequence
  Description of Artificial Sequence: Synthetic peptide
  MOD_RES (4)..(4): phosphorylated serine
RPISPGLSF

SEQ ID NO: 1568 - protein, 9 aa, Artificial Sequence
  Description of Artificial Sequence: Synthetic peptide
  MOD_RES (4)..(4): phosphorylated serine
RPISPGLSL

SEQ ID NO: 1569 - protein, 9 aa, Artificial Sequence
  Description of Artificial Sequence: Synthetic peptide
  MOD_RES (4)..(4): phosphorylated serine
RPISPGLSM

SEQ ID NO: 1570 - protein, 9 aa, Artificial Sequence
  Description of Artificial Sequence: Synthetic peptide
  MOD_RES (4)..(4): phosphorylated serine
RPISPGLSV

SEQ ID NO: 1571 - protein, 9 aa, Artificial Sequence
  Description of Artificial Sequence: Synthetic peptide
  MOD_RES (4)..(4): phosphorylated serine
RPISPGLSY

SEQ ID NO: 1572 - protein, 9 aa, Artificial Sequence
  Description of Artificial Sequence: Synthetic peptide
  MOD_RES (4)..(4): phosphorylated serine
RPISPPHTY

SEQ ID NO: 1573 - protein, 10 aa, Artificial Sequence
  Description of Artificial Sequence: Synthetic peptide
  MOD_RES (4)..(4): phosphorylated serine
RPISPRIGAL

SEQ ID NO: 1574 - protein, 10 aa, Artificial Sequence
  Description of Artificial Sequence: Synthetic peptide
  MOD_RES (4)..(4): phosphorylated threonine
RPITPPRNSA

SEQ ID NO: 1575 - protein, 10 aa, Artificial Sequence
  Description of Artificial Sequence: Synthetic peptide
  MOD_RES (4)..(4): phosphorylated threonine
RPITPPRNSF

SEQ ID NO: 1576 - protein, 10 aa, Artificial Sequence
  Description of Artificial Sequence: Synthetic peptide
  MOD_RES (4)..(4): phosphorylated threonine
RPITPPRNSL

SEQ ID NO: 1577 - protein, 10 aa, Artificial Sequence
  Description of Artificial Sequence: Synthetic peptide
  MOD_RES (4)..(4): phosphorylated threonine
RPITPPRNSM

SEQ ID NO: 1578 - protein, 10 aa, Artificial Sequence
  Description of Artificial Sequence: Synthetic peptide
  MOD_RES (4)..(4): phosphorylated threonine
RPITPPRNSV

SEQ ID NO: 1579 - protein, 9 aa, Artificial Sequence
  Description of Artificial Sequence: Synthetic peptide
  MOD_RES (6)..(6): phosphorylated serine
RPKLSSPAF

SEQ ID NO: 1580 - protein, 9 aa, Artificial Sequence
  Description of Artificial Sequence: Synthetic peptide
  MOD_RES (6)..(6): phosphorylated serine
RPKLSSPAL

SEQ ID NO: 1581 - protein, 9 aa, Artificial Sequence
  Description of Artificial Sequence: Synthetic peptide
  MOD_RES (6)..(6): phosphorylated serine
RPKLSSPAM

SEQ ID NO: 1582 - protein, 9 aa, Artificial Sequence
  Description of Artificial Sequence: Synthetic peptide
  MOD_RES (6)..(6): phosphorylated serine
RPKLSSPAV

SEQ ID NO: 1583 - protein, 9 aa, Artificial Sequence
  Description of Artificial Sequence: Synthetic peptide
  MOD_RES (7)..(7): phosphorylated serine
RPKPSSSPF

SEQ ID NO: 1584 - protein, 9 aa, Artificial Sequence
  Description of Artificial Sequence: Synthetic peptide
  MOD_RES (7)..(7): phosphorylated serine
RPKPSSSPL

SEQ ID NO: 1585 - protein, 9 aa, Artificial Sequence
  Description of Artificial Sequence: Synthetic peptide
  MOD_RES (7)..(7): phosphorylated serine
RPKPSSSPM

SEQ ID NO: 1586 - protein, 9 aa, Artificial Sequence
  Description of Artificial Sequence: Synthetic peptide
  MOD_RES (7)..(7): phosphorylated serine
RPKPSSSPV

SEQ ID NO: 1587 - protein, 9 aa, Artificial Sequence
  Description of Artificial Sequence: Synthetic peptide
  MOD_RES (4)..(4): phosphorylated serine
RPKSNIVLF

SEQ ID NO: 1588 - protein, 9 aa, Artificial Sequence
  Description of Artificial Sequence: Synthetic peptide
  MOD_RES (4)..(4): phosphorylated serine
RPKSNIVLL

SEQ ID NO: 1589 - protein, 9 aa, Artificial Sequence
  Description of Artificial Sequence: Synthetic peptide
  MOD_RES (4)..(4): phosphorylated serine
RPKSNIVLM

SEQ ID NO: 1590 - protein, 9 aa, Artificial Sequence
  Description of Artificial Sequence: Synthetic peptide
  MOD_RES (4)..(4): phosphorylated serine
RPKSNIVLV

SEQ ID NO: 1591 - protein, 9 aa, Artificial Sequence
  Description of Artificial Sequence: Synthetic peptide
  MOD_RES (4)..(4): phosphorylated serine
  MOD_RES (9)..(9): oxidized methionine
RPKSPLSKM

SEQ ID NO: 1592 - protein, 9 aa, Artificial Sequence
  Description of Artificial Sequence: Synthetic peptide
  MOD_RES (4)..(4): phosphorylated serine
RPKSPLSKM

SEQ ID NO: 1593 - protein, 9 aa, Artificial Sequence
  Description of Artificial Sequence: Synthetic peptide
  MOD_RES (4)..(4): phosphorylated serine
RPKSQVAEF

SEQ ID NO: 1594 - protein, 9 aa, Artificial Sequence
  Description of Artificial Sequence: Synthetic peptide
  MOD_RES (4)..(4): phosphorylated serine
RPKSQVAEL

SEQ ID NO: 1595 - protein, 9 aa, Artificial Sequence
  Description of Artificial Sequence: Synthetic peptide
  MOD_RES (4)..(4): phosphorylated serine
RPKSQVAEM

SEQ ID NO: 1596 - protein, 9 aa, Artificial Sequence
  Description of Artificial Sequence: Synthetic peptide
  MOD_RES (4)..(4): phosphorylated serine
RPKSQVAEV

SEQ ID NO: 1597 - protein, 10 aa, Artificial Sequence
  Description of Artificial Sequence: Synthetic peptide
  MOD_RES (4)..(4): phosphorylated serine
RPKSVDFDSL

SEQ ID NO: 1598 - protein, 9 aa, Artificial Sequence
  Description of Artificial Sequence: Synthetic peptide
  MOD_RES (4)..(4): phosphorylated threonine
RPKTPPVVI

SEQ ID NO: 1599 - protein, 9 aa, Artificial Sequence
  Description of Artificial Sequence: Synthetic peptide
  MOD_RES (4)..(4): phosphorylated serine
RPLSLLLAL

SEQ ID NO: 1600 - protein, 9 aa, Artificial Sequence
  Description of Artificial Sequence: Synthetic peptide
  MOD_RES (4)..(4): phosphorylated serine
RPLSPGGAF

SEQ ID NO: 1601 - protein, 9 aa, Artificial Sequence
  Description of Artificial Sequence: Synthetic peptide
  MOD_RES (4)..(4): phosphorylated serine
RPLSPGGAL

SEQ ID NO: 1602 - protein, 9 aa, Artificial Sequence
  Description of Artificial Sequence: Synthetic peptide
  MOD_RES (4)..(4): phosphorylated serine
RPLSPGGAM

SEQ ID NO: 1603 - protein, 9 aa, Artificial Sequence
  Description of Artificial Sequence: Synthetic peptide
  MOD_RES (4)..(4): phosphorylated serine
RPLSPGGAV

SEQ ID NO: 1604 - protein, 8 aa, Artificial Sequence
  Description of Artificial Sequence: Synthetic peptide
  MOD_RES (4)..(4): phosphorylated serine
RPLSPLLF

SEQ ID NO: 1605 - protein, 8 aa, Artificial Sequence
  Description of Artificial Sequence: Synthetic peptide
  MOD_RES (4)..(4): phosphorylated serine
RPLSPLLL

SEQ ID NO: 1606 - protein, 8 aa, Artificial Sequence
  Description of Artificial Sequence: Synthetic peptide
  MOD_RES (4)..(4): phosphorylated serine
RPLSPLLM

SEQ ID NO: 1607 - protein, 8 aa, Artificial Sequence
  Description of Artificial Sequence: Synthetic peptide
  MOD_RES (4)..(4): phosphorylated serine
RPLSPLLV

SEQ ID NO: 1608 - protein, 9 aa, Artificial Sequence
  Description of Artificial Sequence: Synthetic peptide
  MOD_RES (4)..(4): phosphorylated serine
RPLSVVYVL

SEQ ID NO: 1609 - protein, 9 aa, Artificial Sequence
  Description of Artificial Sequence: Synthetic peptide
  MOD_RES (4)..(4): phosphorylated serine
RPMSESPHM

SEQ ID NO: 1610 - protein, 10 aa, Artificial Sequence
  Description of Artificial Sequence: Synthetic peptide
  MOD_RES (4)..(4): phosphorylated serine
RPNSPSPTAF

SEQ ID NO: 1611 - protein, 10 aa, Artificial Sequence
  Description of Artificial Sequence: Synthetic peptide
  MOD_RES (4)..(4): phosphorylated serine
RPNSPSPTAL

SEQ ID NO: 1612 - protein, 10 aa, Artificial Sequence
  Description of Artificial Sequence: Synthetic peptide
  MOD_RES (4)..(4): phosphorylated serine
RPNSPSPTAM

SEQ ID NO: 1613 - protein, 10 aa, Artificial Sequence
  Description of Artificial Sequence: Synthetic peptide
  MOD_RES (4)..(4): phosphorylated serine
RPNSPSPTAV

SEQ ID NO: 1614 - protein, 10 aa, Artificial Sequence
  Description of Artificial Sequence: Synthetic peptide
RPPIGTQSSL

SEQ ID NO: 1615 - protein, 10 aa, Artificial Sequence
  Description of Artificial Sequence: Synthetic peptide
  MOD_RES (8)..(8): phosphorylated threonine
RPPPPPDTPF

SEQ ID NO: 1616 - protein, 10 aa, Artificial Sequence
  Description of Artificial Sequence: Synthetic peptide
  MOD_RES (8)..(8): phosphorylated threonine
RPPPPPDTPL

SEQ ID NO: 1617 - protein, 10 aa, Artificial Sequence
  Description of Artificial Sequence: Synthetic peptide
  MOD_RES (8)..(8): phosphorylated threonine
RPPPPPDTPM

SEQ ID NO: 1618 - protein, 10 aa, Artificial Sequence
  Description of Artificial Sequence: Synthetic peptide
  MOD_RES (8)..(8): phosphorylated threonine
RPPPPPDTPP

SEQ ID NO: 1619 - protein, 10 aa, Artificial Sequence
  Description of Artificial Sequence: Synthetic peptide
  MOD_RES (8)..(8): phosphorylated threonine
RPPPPPDTPV

SEQ ID NO: 1620 - protein, 9 aa, Artificial Sequence
  Description of Artificial Sequence: Synthetic peptide
  MOD_RES (4)..(4): phosphorylated serine
RPPSPGPVF

SEQ ID NO: 1621 - protein, 9 aa, Artificial Sequence
  Description of Artificial Sequence: Synthetic peptide
  MOD_RES (4)..(4): phosphorylated serine
RPPSPGPVL

SEQ ID NO: 1622 - protein, 9 aa, Artificial Sequence
  Description of Artificial Sequence: Synthetic peptide
  MOD_RES (4)..(4): phosphorylated serine
RPPSPGPVM

SEQ ID NO: 1623 - protein, 9 aa, Artificial Sequence
  Description of Artificial Sequence: Synthetic peptide
  MOD_RES (4)..(4): phosphorylated serine
RPPSPGPVV

SEQ ID NO: 1624 - protein, 9 aa, Artificial Sequence
  Description of Artificial Sequence: Synthetic peptide
  MOD_RES (4)..(4): phosphorylated serine
RPPSPSSRF

SEQ ID NO: 1625 - protein, 9 aa, Artificial Sequence
  Description of Artificial Sequence: Synthetic peptide
  MOD_RES (4)..(4): phosphorylated serine
RPPSPSSRL

SEQ ID NO: 1626 - protein, 9 aa, Artificial Sequence
  Description of Artificial Sequence: Synthetic peptide
  MOD_RES (4)..(4): phosphorylated serine
RPPSPSSRM

SEQ ID NO: 1627 - protein, 9 aa, Artificial Sequence
  Description of Artificial Sequence: Synthetic peptide
  MOD_RES (4)..(4): phosphorylated serine
RPPSPSSRV

SEQ ID NO: 1628 - protein, 10 aa, Artificial Sequence
  Description of Artificial Sequence: Synthetic peptide
  MOD_RES (4)..(4): phosphorylated serine
RPPSSEFLDF

SEQ ID NO: 1629 - protein, 10 aa, Artificial Sequence
  Description of Artificial Sequence: Synthetic peptide
  MOD_RES (4)..(4): phosphorylated serine
RPPSSEFLDL

SEQ ID NO: 1630 - protein, 10 aa, Artificial Sequence
  Description of Artificial Sequence: Synthetic peptide
  MOD_RES (4)..(4): phosphorylated serine
RPPSSEFLDM

SEQ ID NO: 1631 - protein, 10 aa, Artificial Sequence
  Description of Artificial Sequence: Synthetic peptide
  MOD_RES (4)..(4): phosphorylated serine
RPPSSEFLDV

SEQ ID NO: 1632 - protein, 9 aa, Artificial Sequence
  Description of Artificial Sequence: Synthetic peptide
  MOD_RES (7)..(7): phosphorylated serine
RPQKTQSII

SEQ ID NO: 1633 - protein, 10 aa, Artificial Sequence
  Description of Artificial Sequence: Synthetic peptide
  MOD_RES (6)..(6): phosphorylated threonine
RPQRATSNVF

SEQ ID NO: 1634 - protein, 10 aa, Artificial Sequence
  Description of Artificial Sequence: Synthetic peptide
  MOD_RES (7)..(7): phosphorylated serine
RPQRATSNVF

SEQ ID NO: 1635 - protein, 10 aa, Artificial Sequence
  Description of Artificial Sequence: Synthetic peptide
  MOD_RES (6)..(6): phosphorylated threonine
RPQRATSNVL

SEQ ID NO: 1636 - protein, 10 aa, Artificial Sequence
  Description of Artificial Sequence: Synthetic peptide
  MOD_RES (7)..(7): phosphorylated serine
RPQRATSNVL

SEQ ID NO: 1637 - protein, 10 aa, Artificial Sequence
  Description of Artificial Sequence: Synthetic peptide
  MOD_RES (6)..(6): phosphorylated threonine
RPQRATSNVM

SEQ ID NO: 1638 - protein, 10 aa, Artificial Sequence
  Description of Artificial Sequence: Synthetic peptide
  MOD_RES (7)..(7): phosphorylated serine
RPQRATSNVM

SEQ ID NO: 1639 - protein, 10 aa, Artificial Sequence
  Description of Artificial Sequence: Synthetic peptide
  MOD_RES (6)..(6): phosphorylated threonine
RPQRATSNVV

SEQ ID NO: 1640 - protein, 10 aa, Artificial Sequence
  Description of Artificial Sequence: Synthetic peptide
  MOD_RES (7)..(7): phosphorylated serine
RPQRATSNVV

SEQ ID NO: 1641 - protein, 12 aa, Artificial Sequence
  Description of Artificial Sequence: Synthetic peptide
  MISC_FEATURE (4)..(7): at least one serine residue in the amino acid sequence SLSS is phosphorylated
RPRSLSSPTVTL

SEQ ID NO: 1642 - protein, 12 aa, Artificial Sequence
  Description of Artificial Sequence: Synthetic peptide
  MISC_FEATURE (4)..(7): at least one serine residue in the amino acid sequence SLSS is phosphorylated
RPRSLSSPTVTV

SEQ ID NO: 1643 - protein, 8 aa, Artificial Sequence
  Description of Artificial Sequence: Synthetic peptide
  MOD_RES (6)..(6): phosphorylated threonine
RPRAATVV

SEQ ID NO: 1644 - protein, 9 aa, Artificial Sequence
  Description of Artificial Sequence: Synthetic peptide
  MOD_RES (6)..(6): phosphorylated threonine
RPRAATVVA

SEQ ID NO: 1645 - protein, 7 aa, Artificial Sequence
  Description of Artificial Sequence: Synthetic peptide
  MOD_RES (6)..(6): phosphorylated threonine
RPRAATW

SEQ ID NO: 1646 - protein, 8 aa, Artificial Sequence
  Description of Artificial Sequence: Synthetic peptide
  MOD_RES (6)..(6): phosphorylated threonine
RPRAATWA

SEQ ID NO: 1647 - protein, 11 aa, Artificial Sequence
  Description of Artificial Sequence: Synthetic peptide
  MOD_RES (6)..(6): phosphorylated serine
RPRANSGGVDF

SEQ ID NO: 1648 - protein, 11 aa, Artificial Sequence
  Description of Artificial Sequence: Synthetic peptide
  MOD_RES (6)..(6): phosphorylated serine
RPRANSGGVDL

SEQ ID NO: 1649 - protein, 11 aa, Artificial Sequence
  Description of Artificial Sequence: Synthetic peptide
  MOD_RES (6)..(6): phosphorylated serine
RPRANSGGVDM

SEQ ID NO: 1650 - protein, 11 aa, Artificial Sequence
  Description of Artificial Sequence: Synthetic peptide
  MOD_RES (6)..(6): phosphorylated serine
RPRANSGGVDV

SEQ ID NO: 1651 - protein, 10 aa, Artificial Sequence
  Description of Artificial Sequence: Synthetic peptide
  MOD_RES (6)..(6): phosphorylated serine
RPRARSVDAL

SEQ ID NO: 1652 - protein, 10 aa, Artificial Sequence
  Description of Artificial Sequence: Synthetic peptide
  MOD_RES (5)..(5): phosphorylated threonine
RPRDTRRISL

SEQ ID NO: 1653 - protein, 9 aa, Artificial Sequence
  Description of Artificial Sequence: Synthetic peptide
  MOD_RES (5)..(5): phosphorylated serine
RPRGSESLL

SEQ ID NO: 1654 - protein, 9 aa, Artificial Sequence
  Description of Artificial Sequence: Synthetic peptide
  MOD_RES (5)..(5): phosphorylated serine
RPRGSQSLF

SEQ ID NO: 1655 - protein, 9 aa, Artificial Sequence
  Description of Artificial Sequence: Synthetic peptide
  MOD_RES (5)..(5): phosphorylated serine
RPRGSQSLL

SEQ ID NO: 1656 - protein, 9 aa, Artificial Sequence
  Description of Artificial Sequence: Synthetic peptide
  MOD_RES (5)..(5): phosphorylated serine
RPRGSQSLM

SEQ ID NO: 1657 - protein, 9 aa, Artificial Sequence
  Description of Artificial Sequence: Synthetic peptide
  MOD_RES (5)..(5): phosphorylated serine
RPRGSQSLV

SEQ ID NO: 1658 - protein, 10 aa, Artificial Sequence
  Description of Artificial Sequence: Synthetic peptide
  MOD_RES (6)..(6): phosphorylated serine
RPRIPSPIGF

SEQ ID NO: 1659 - protein, 12 aa, Artificial Sequence
  Description of Artificial Sequence: Synthetic peptide
  MOD_RES (6)..(6): phosphorylated serine
RPRLSSTNSSRF

SEQ ID NO: 1660 - protein, 10 aa, Artificial Sequence
  Description of Artificial Sequence: Synthetic peptide
  MOD_RES (6)..(6): phosphorylated serine
RPRPASSPAL

SEQ ID NO: 1661 - protein, 10 aa, Artificial Sequence
  Description of Artificial Sequence: Synthetic peptide
  MOD_RES (6)..(6): phosphorylated serine
RPRPHSAPSF

SEQ ID NO: 1662 - protein, 10 aa, Artificial Sequence
  Description of Artificial Sequence: Synthetic peptide
  MOD_RES (6)..(6): phosphorylated serine
RPRPHSAPSL

SEQ ID NO: 1663 - protein, 10 aa, Artificial Sequence
  Description of Artificial Sequence: Synthetic peptide
  MOD_RES (6)..(6): phosphorylated serine
RPRPHSAPSM

SEQ ID NO: 1664 - protein, 10 aa, Artificial Sequence
  Description of Artificial Sequence: Synthetic peptide
  MOD_RES (6)..(6): phosphorylated serine
RPRPHSAPSV

SEQ ID NO: 1665 - protein, 11 aa, Artificial Sequence
  Description of Artificial Sequence: Synthetic peptide
  MOD_RES (6)..(6): phosphorylated serine
RPRPSSAHVGL

SEQ ID NO: 1666 - protein, 8 aa, Artificial Sequence
  Description of Artificial Sequence: Synthetic peptide
  MOD_RES (5)..(5): phosphorylated serine
RPRPSSVL

SEQ ID NO: 1667 - protein, 11 aa, Artificial Sequence
  Description of Artificial Sequence: Synthetic peptide
  MOD_RES (5)..(5): phosphorylated serine
RPRPSSVLRTL

SEQ ID NO: 1668 - protein, 10 aa, Artificial Sequence
  Description of Artificial Sequence: Synthetic peptide
  MOD_RES (6)..(6): phosphorylated serine
RPRPVSPSSF

SEQ ID NO: 1669 - protein, 10 aa, Artificial Sequence
  Description of Artificial Sequence: Synthetic peptide
  MOD_RES (6)..(6): phosphorylated serine
RPRPVSPSSL

SEQ ID NO: 1670 - protein, 11 aa, Artificial Sequence
  Description of Artificial Sequence: Synthetic peptide
  MOD_RES (6)..(6): phosphorylated serine
RPRPVSPSSLL

SEQ ID NO: 1671 - protein, 10 aa, Artificial Sequence
  Description of Artificial Sequence: Synthetic peptide
  MOD_RES (6)..(6): phosphorylated serine
RPRPVSPSSM

SEQ ID NO: 1672 - protein, 10 aa, Artificial Sequence
  Description of Artificial Sequence: Synthetic peptide
  MOD_RES (6)..(6): phosphorylated serine
RPRPVSPSSV

SEQ ID NO: 1673 - protein, 9 aa, Artificial Sequence
  Description of Artificial Sequence: Synthetic peptide
  MOD_RES (5)..(5): phosphorylated serine
RPRRSSTQF

SEQ ID NO: 1674 - protein, 9 aa, Artificial Sequence
  Description of Artificial Sequence: Synthetic peptide
  MOD_RES (5)..(5): phosphorylated serine
RPRRSSTQL

SEQ ID NO: 1675 - protein, 9 aa, Artificial Sequence
  Description of Artificial Sequence: Synthetic peptide
  MOD_RES (5)..(5): phosphorylated serine
RPRRSSTQM

SEQ ID NO: 1676 - protein, 9 aa, Artificial Sequence
  Description of Artificial Sequence: Synthetic peptide
  MOD_RES (5)..(5): phosphorylated serine
RPRRSSTQV

SEQ ID NO: 1677 - protein, 9 aa, Artificial Sequence
  Description of Artificial Sequence: Synthetic peptide
  MOD_RES (4)..(4): phosphorylated serine
RPRSAVEQL

SEQ ID NO: 1678 - protein, 8 aa, Artificial Sequence
  Description of Artificial Sequence: Synthetic peptide
  MOD_RES (4)..(4): phosphorylated serine
RPRSAVLF

SEQ ID NO: 1679 - protein, 8 aa, Artificial Sequence
  Description of Artificial Sequence: Synthetic peptide
  MOD_RES (4)..(4): phosphorylated serine
RPRSAVLL

SEQ ID NO: 1680 - protein, 8 aa, Artificial Sequence
  Description of Artificial Sequence: Synthetic peptide
  MOD_RES (4)..(4): phosphorylated serine
RPRSAVLM

SEQ ID NO: 1681 - protein, 8 aa, Artificial Sequence
  Description of Artificial Sequence: Synthetic peptide
  MOD_RES (4)..(4): phosphorylated serine
RPRSAVLV

SEQ ID NO: 1682 - protein, 11 aa, Artificial Sequence
  Description of Artificial Sequence: Synthetic peptide
  MOD_RES (6)..(6): phosphorylated serine
RPRSGSTGSSL

SEQ ID NO: 1683 - protein, 10 aa, Artificial Sequence
  Description of Artificial Sequence: Synthetic peptide
  MOD_RES (4)..(4): phosphorylated serine
RPRSISVEEF

SEQ ID NO: 1684 - protein, 10 aa, Artificial Sequence
  Description of Artificial Sequence: Synthetic peptide
  MOD_RES (4)..(4): phosphorylated serine
RPRSISVEEL

SEQ ID NO: 1685 - protein, 10 aa, Artificial Sequence
  Description of Artificial Sequence: Synthetic peptide
  MOD_RES (4)..(4): phosphorylated serine
RPRSISVEEM

SEQ ID NO: 1686 - protein, 10 aa, Artificial Sequence
  Description of Artificial Sequence: Synthetic peptide
  MOD_RES (4)..(4): phosphorylated serine
RPRSISVEEV

SEQ ID NO: 1687 - protein, 9 aa, Artificial Sequence
  Description of Artificial Sequence: Synthetic peptide
  MOD_RES (4)..(4): phosphorylated serine
RPRSLEVTF

SEQ ID NO: 1688 - protein, 9 aa, Artificial Sequence
  Description of Artificial Sequence: Synthetic peptide
  MOD_RES (4)..(4): phosphorylated serine
RPRSLEVTI

SEQ ID NO: 1689 - protein, 9 aa, Artificial Sequence
  Description of Artificial Sequence: Synthetic peptide
  MOD_RES (4)..(4): phosphorylated serine
RPRSLEVTL

SEQ ID NO: 1690 - protein, 9 aa, Artificial Sequence
  Description of Artificial Sequence: Synthetic peptide
  MOD_RES (4)..(4): phosphorylated serine
RPRSLEVTM

SEQ ID NO: 1691 - protein, 9 aa, Artificial Sequence
  Description of Artificial Sequence: Synthetic peptide
  MOD_RES (4)..(4): phosphorylated serine
RPRSLEVTV

SEQ ID NO: 1692 - protein, 10 aa, Artificial Sequence
  Description of Artificial Sequence: Synthetic peptide
  MOD_RES (6)..(6): phosphorylated serine
RPRSLSSPTV

SEQ ID NO: 1693 - protein, 12 aa, Artificial Sequence
  Description of Artificial Sequence: Synthetic peptide
  MOD_RES (6)..(6): phosphorylated serine
RPRSLSSPTVTF

SEQ ID NO: 1694 - protein, 12 aa, Artificial Sequence
  Description of Artificial Sequence: Synthetic peptide
  MOD_RES (6)..(6): phosphorylated serine
RPRSLSSPTVTL

SEQ ID NO: 1695 - protein, 12 aa, Artificial Sequence
  Description of Artificial Sequence: Synthetic peptide
  MOD_RES (6)..(6): phosphorylated serine
RPRSLSSPTVTM

SEQ ID NO: 1696 - protein, 12 aa, Artificial Sequence
  Description of Artificial Sequence: Synthetic peptide
  MOD_RES (6)..(6): phosphorylated serine
RPRSLSSPTVTV

SEQ ID NO: 1697 - protein, 9 aa, Artificial Sequence
  Description of Artificial Sequence: Synthetic peptide
  MOD_RES (4)..(4): phosphorylated serine
RPRSMTVSA

SEQ ID NO: 1698 - protein, 9 aa, Artificial Sequence
  Description of Artificial Sequence: Synthetic peptide
  MOD_RES (4)..(4): phosphorylated serine
RPRSMVRSF

SEQ ID NO: 1699 - protein, 9 aa, Artificial Sequence
  Description of Artificial Sequence: Synthetic peptide
  MOD_RES (4)..(4): phosphorylated serine
RPRSPAARF

SEQ ID NO: 1700 - protein, 9 aa, Artificial Sequence
  Description of Artificial Sequence: Synthetic peptide
  MOD_RES (4)..(4): phosphorylated serine
RPRSPAARL

SEQ ID NO: 1701 - protein, 9 aa, Artificial Sequence
  Description of Artificial Sequence: Synthetic peptide
  MOD_RES (4)..(4): phosphorylated serine
RPRSPAARM

SEQ ID NO: 1702 - protein, 9 aa, Artificial Sequence
  Description of Artificial Sequence: Synthetic peptide
  MOD_RES (4)..(4): phosphorylated serine
RPRSPAARV

SEQ ID NO: 1703 - protein, 11 aa, Artificial Sequence
  Description of Artificial Sequence: Synthetic peptide
  MOD_RES (4)..(4): phosphorylated serine
RPRSPGSNSKV

SEQ ID NO: 1704 - protein, 10 aa, Artificial Sequence
  Description of Artificial Sequence: Synthetic peptide
  MOD_RES (4)..(4): phosphorylated serine
RPRSPNMQDL

SEQ ID NO: 1705 - protein, 9 aa, Artificial Sequence
  Description of Artificial Sequence: Synthetic peptide
  MOD_RES (4)..(4): phosphorylated serine
RPRSPPGGP

SEQ ID NO: 1706 - protein, 10 aa, Artificial Sequence
  Description of Artificial Sequence: Synthetic peptide
  MOD_RES (4)..(4): phosphorylated serine
RPRSPPPRAF

SEQ ID NO: 1707 - protein, 10 aa, Artificial Sequence
  Description of Artificial Sequence: Synthetic peptide
  MOD_RES (4)..(4): phosphorylated serine
RPRSPPPRAL

SEQ ID NO: 1708 - protein, 10 aa, Artificial Sequence
  Description of Artificial Sequence: Synthetic peptide
  MOD_RES (4)..(4): phosphorylated serine
RPRSPPPRAM

SEQ ID NO: 1709 - protein, 10 aa, Artificial Sequence
  Description of Artificial Sequence: Synthetic peptide
  MOD_RES (4)..(4): phosphorylated serine
RPRSPPPRAP

SEQ ID NO: 1710 - protein, 10 aa, Artificial Sequence
  Description of Artificial Sequence: Synthetic peptide
  MOD_RES (4)..(4): phosphorylated serine
RPRSPPPRAV

SEQ ID NO: 1711 - protein, 9 aa, Artificial Sequence
  Description of Artificial Sequence: Synthetic peptide
  MOD_RES (4)..(4): phosphorylated serine
RPRSPPSSP

SEQ ID NO: 1712 - protein, 10 aa, Artificial Sequence
  Description of Artificial Sequence: Synthetic peptide
  MOD_RES (4)..(4): phosphorylated serine
RPRSPRENSF

SEQ ID NO: 1713 - protein, 10 aa, Artificial Sequence
  Description of Artificial Sequence: Synthetic peptide
  MOD_RES (4)..(4): phosphorylated serine
RPRSPRENSI

SEQ ID NO: 1714 - protein, 10 aa, Artificial Sequence
  Description of Artificial Sequence: Synthetic peptide
  MOD_RES (4)..(4): phosphorylated serine
RPRSPRENSL

SEQ ID NO: 1715 - protein, 10 aa, Artificial Sequence
  Description of Artificial Sequence: Synthetic peptide
  MOD_RES (4)..(4): phosphorylated serine
RPRSPRENSM

SEQ ID NO: 1716 - protein, 10 aa, Artificial Sequence
  Description of Artificial Sequence: Synthetic peptide
  MOD_RES (4)..(4): phosphorylated serine
RPRSPRENSV

SEQ ID NO: 1717 - protein, 9 aa, Artificial Sequence
  Description of Artificial Sequence: Synthetic peptide
  MOD_RES (4)..(4): phosphorylated serine
RPRSPRPPP

SEQ ID NO: 1718 - protein, 10 aa, Artificial Sequence
  Description of Artificial Sequence: Synthetic peptide
  MOD_RES (4)..(4): phosphorylated serine
RPRSPRQNLI

SEQ ID NO: 1719 - protein, 10 aa, Artificial Sequence
  Description of Artificial Sequence: Synthetic peptide
  MOD_RES (4)..(4): phosphorylated serine
RPRSPRQNSF

SEQ ID NO: 1720 - protein, 10 aa, Artificial Sequence
  Description of Artificial Sequence: Synthetic peptide
  MOD_RES (4)..(4): phosphorylated serine
RPRSPRQNSI

SEQ ID NO: 1721 - protein, 10 aa, Artificial Sequence
  Description of Artificial Sequence: Synthetic peptide
  MOD_RES (4)..(4): phosphorylated serine
RPRSPRQNSM

SEQ ID NO: 1722 - protein, 10 aa, Artificial Sequence
  Description of Artificial Sequence: Synthetic peptide
  MOD_RES (4)..(4): phosphorylated serine
RPRSPRQNSV

SEQ ID NO: 1723 - protein, 9 aa, Artificial Sequence
  Description of Artificial Sequence: Synthetic peptide
  MOD_RES (4)..(4): phosphorylated serine
RPRSPSPIF

SEQ ID NO: 1724 - protein, 9 aa, Artificial Sequence
  Description of Artificial Sequence: Synthetic peptide
  MOD_RES (4)..(4): phosphorylated serine
RPRSPSPIL

SEQ ID NO: 1725 - protein, 9 aa, Artificial Sequence
  Description of Artificial Sequence: Synthetic peptide
  MOD_RES (4)..(4): phosphorylated serine
RPRSPSPIM

SEQ ID NO: 1726 - protein, 9 aa, Artificial Sequence
  Description of Artificial Sequence: Synthetic peptide
  MOD_RES (4)..(4): phosphorylated serine
RPRSPSPIS

SEQ ID NO: 1727 - protein, 9 aa, Artificial Sequence
  Description of Artificial Sequence: Synthetic peptide
  MOD_RES (6)..(6): phosphorylated serine
RPRSPSPIS

SEQ ID NO: 1728 - protein, 9 aa, Artificial Sequence
  Description of Artificial Sequence: Synthetic peptide
  MOD_RES (4)..(4): phosphorylated serine
RPRSPSPIV

SEQ ID NO: 1729 - protein, 8 aa, Artificial Sequence
  Description of Artificial Sequence: Synthetic peptide
  MOD_RES (4)..(4): phosphorylated serine
RPRSPTGF

SEQ ID NO: 1730 - protein, 8 aa, Artificial Sequence
  Description of Artificial Sequence: Synthetic peptide
  MOD_RES (4)..(4): phosphorylated serine
RPRSPTGL

SEQ ID NO: 1731 - protein, 8 aa, Artificial Sequence
  Description of Artificial Sequence: Synthetic peptide
  MOD_RES (4)..(4): phosphorylated serine
RPRSPTGM

SEQ ID NO: 1732 - protein, 8 aa, Artificial Sequence
  Description of Artificial Sequence: Synthetic peptide
  MOD_RES (4)..(4): phosphorylated serine
RPRSPTGP

SEQ ID NO: 1733 - protein, 12 aa, Artificial Sequence
  Description of Artificial Sequence: Synthetic peptide
  MOD_RES (4)..(4): phosphorylated serine
  MOD_RES (9)..(9): phosphorylated serine
RPRSPTGPSNSF

SEQ ID NO: 1734 - protein, 12 aa, Artificial Sequence
  Description of Artificial Sequence: Synthetic peptide
  MOD_RES (4)..(4): phosphorylated serine
RPRSPTGPSNSF

SEQ ID NO: 1735 - protein, 13 aa, Artificial Sequence
  Description of Artificial Sequence: Synthetic peptide
  MOD_RES (4)..(4): phosphorylated serine
RPRSPTGPSNSFL

SEQ ID NO: 1736 - protein, 12 aa, Artificial Sequence
  Description of Artificial Sequence: Synthetic peptide
  MOD_RES (4)..(4): phosphorylated serine
  MOD_RES (9)..(9): phosphorylated serine
RPRSPTGPSNSL

SEQ ID NO: 1737 - protein, 12 aa, Artificial Sequence
  Description of Artificial Sequence: Synthetic peptide
  MOD_RES (4)..(4): phosphorylated serine
  MOD_RES (9)..(9): phosphorylated serine
RPRSPTGPSNSM

SEQ ID NO: 1738 - protein, 12 aa, Artificial Sequence
  Description of Artificial Sequence: Synthetic peptide
  MOD_RES (4)..(4): phosphorylated serine
  MOD_RES (9)..(9): phosphorylated serine
RPRSPTGPSNSV

SEQ ID NO: 1739 - protein, 8 aa, Artificial Sequence
  Description of Artificial Sequence: Synthetic peptide
  MOD_RES (4)..(4): phosphorylated serine
RPRSPTGV

SEQ ID NO: 1740 - protein, 9 aa, Artificial Sequence
  Description of Artificial Sequence: Synthetic peptide
  MOD_RES (4)..(4): phosphorylated serine
RPRSPTRSF

SEQ ID NO: 1741 - protein, 9 aa, Artificial Sequence
  Description of Artificial Sequence: Synthetic peptide
  MOD_RES (4)..(4): phosphorylated serine
RPRSPTRSL

SEQ ID NO: 1742 - protein, 9 aa, Artificial Sequence
  Description of Artificial Sequence: Synthetic peptide
  MOD_RES (4)..(4): phosphorylated serine
RPRSPTRSM

SEQ ID NO: 1743 - protein, 9 aa, Artificial Sequence
  Description of Artificial Sequence: Synthetic peptide
  MOD_RES (4)..(4): phosphorylated serine
RPRSPTRSV

SEQ ID NO: 1744 - protein, 9 aa, Artificial Sequence
  Description of Artificial Sequence: Synthetic peptide
  MOD_RES (4)..(4): phosphorylated serine
RPRSPWGKL

SEQ ID NO: 1745 - protein, 10 aa, Artificial Sequence
  Description of Artificial Sequence: Synthetic peptide
  MOD_RES (4)..(4): phosphorylated serine
RPRSQYNTKL

SEQ ID NO: 1746 - protein, 12 aa, Artificial Sequence
  Description of Artificial Sequence: Synthetic peptide
  MOD_RES (6)..(6): phosphorylated serine
RPRSTSQSIVSL

SEQ ID NO: 1747 - protein, 9 aa, Artificial Sequence
  Description of Artificial Sequence: Synthetic peptide
  MOD_RES (4)..(4): phosphorylated threonine
RPRTPLRSL

SEQ ID NO: 1748 - protein, 9 aa, Artificial Sequence
  Description of Artificial Sequence: Synthetic peptide
  MOD_RES (8)..(8): phosphorylated serine
RPSGRRESF

SEQ ID NO: 1749 - protein, 9 aa, Artificial Sequence
  Description of Artificial Sequence: Synthetic peptide
  MOD_RES (8)..(8): phosphorylated serine
RPSGRRESL

SEQ ID NO: 1750 - protein, 9 aa, Artificial Sequence
  Description of Artificial Sequence: Synthetic peptide
  MOD_RES (8)..(8): phosphorylated serine
RPSGRRESM

SEQ ID NO: 1751 - protein, 9 aa, Artificial Sequence
  Description of Artificial Sequence: Synthetic peptide
  MOD_RES (8)..(8): phosphorylated serine
RPSGRRESV

SEQ ID NO: 1752 - protein, 7 aa, Artificial Sequence
  Description of Artificial Sequence: Synthetic peptide
  MOD_RES (3)..(3): phosphorylated serine
RPSNPQL

SEQ ID NO: 1753 - protein, 9 aa, Artificial Sequence
  Description of Artificial Sequence: Synthetic peptide
  MOD_RES (6)..(6): phosphorylated serine
RPSRSSPGF

SEQ ID NO: 1754 - protein, 9 aa, Artificial Sequence
  Description of Artificial Sequence: Synthetic peptide
  MOD_RES (6)..(6): phosphorylated serine
RPSRSSPGL

SEQ ID NO: 1755 - protein, 9 aa, Artificial Sequence
  Description of Artificial Sequence: Synthetic peptide
  MOD_RES (6)..(6): phosphorylated serine
RPSRSSPGM

SEQ ID NO: 1756 - protein, 9 aa, Artificial Sequence
  Description of Artificial Sequence: Synthetic peptide
  MOD_RES (6)..(6): phosphorylated serine
RPSRSSPGV

SEQ ID NO: 1757 - protein, 9 aa, Artificial Sequence
  Description of Artificial Sequence: Synthetic peptide
  MOD_RES (4)..(4): phosphorylated serine
RPSSGFYEL

SEQ ID NO: 1758 - protein, 12 aa, Artificial Sequence
  Description of Artificial Sequence: Synthetic peptide
  MOD_RES (4)..(4): phosphorylated serine
RPSSLDAEIDSF

SEQ ID NO: 1759 - protein, 12 aa, Artificial Sequence
  Description of Artificial Sequence: Synthetic peptide
  MOD_RES (4)..(4): phosphorylated serine
RPSSLDAEIDSL

SEQ ID NO: 1760 - protein, 12 aa, Artificial Sequence
  Description of Artificial Sequence: Synthetic peptide
  MOD_RES (4)..(4): phosphorylated serine
RPSSLDAEIDSM

SEQ ID NO: 1761 - protein, 12 aa, Artificial Sequence
  Description of Artificial Sequence: Synthetic peptide
  MOD_RES (4)..(4): phosphorylated serine
RPSSLDAEIDSV

SEQ ID NO: 1762 - protein, 8 aa, Artificial Sequence
  Description of Artificial Sequence: Synthetic peptide
  MOD_RES (4)..(4): phosphorylated serine
RPSSLPDF

SEQ ID NO: 1763 - protein, 8 aa, Artificial Sequence
  Description of Artificial Sequence: Synthetic peptide
  MOD_RES (4)..(4): phosphorylated serine
RPSSLPDL

SEQ ID NO: 1764 - protein, 8 aa, Artificial Sequence
  Description of Artificial Sequence: Synthetic peptide
  MOD_RES (4)..(4): phosphorylated serine
RPSSLPDM

SEQ ID NO: 1765 - protein, 8 aa, Artificial Sequence
  Description of Artificial Sequence: Synthetic peptide
  MOD_RES (4)..(4): phosphorylated serine
RPSSLPDV

SEQ ID NO: 1766 - protein, 9 aa, Artificial Sequence
  Description of Artificial Sequence: Synthetic peptide
  MOD_RES (3)..(3): phosphorylated serine
RPSSPALYF

SEQ ID NO: 1767 - protein, 9 aa, Artificial Sequence
  Description of Artificial Sequence: Synthetic peptide
  MOD_RES (4)..(4): phosphorylated serine
RPSSPALYF

SEQ ID NO: 1768 - protein, 9 aa, Artificial Sequence
  Description of Artificial Sequence: Synthetic peptide
  MOD_RES (3)..(3): phosphorylated serine
RPSSPALYL

SEQ ID NO: 1769 - protein, 9 aa, Artificial Sequence
  Description of Artificial Sequence: Synthetic peptide
  MOD_RES (3)..(3): phosphorylated serine
RPSSPALYM

SEQ ID NO: 1770 - protein, 9 aa, Artificial Sequence
  Description of Artificial Sequence: Synthetic peptide
  MOD_RES (3)..(3): phosphorylated serine
RPSSPALYV

SEQ ID NO: 1771 - protein, 11 aa, Artificial Sequence
  Description of Artificial Sequence: Synthetic peptide
  MOD_RES (4)..(4): phosphorylated threonine
RPSTPKSDSEF

SEQ ID NO: 1772 - protein, 11 aa, Artificial Sequence
  Description of Artificial Sequence: Synthetic peptide
  MOD_RES (4)..(4): phosphorylated threonine
RPSTPKSDSEL

SEQ ID NO: 1773 - protein, 11 aa, Artificial Sequence
  Description of Artificial Sequence: Synthetic peptide
  MOD_RES (4)..(4): phosphorylated threonine
RPSTPKSDSEM

SEQ ID NO: 1774 - protein, 11 aa, Artificial Sequence
  Description of Artificial Sequence: Synthetic peptide
  MOD_RES (4)..(4): phosphorylated threonine
RPSTPKSDSEV

SEQ ID NO: 1775 - protein, 10 aa, Artificial Sequence
  Description of Artificial Sequence: Synthetic peptide
  MOD_RES (9)..(9): phosphorylated serine
RPTKIGRRSL

SEQ ID NO: 1776 - protein, 9 aa, Artificial Sequence
  Description of Artificial Sequence: Synthetic peptide
  MOD_RES (4)..(4): phosphorylated serine
RPTSFADEL

SEQ ID NO: 1777 - protein, 9 aa, Artificial Sequence
  Description of Artificial Sequence: Synthetic peptide
  MOD_RES (4)..(4): phosphorylated serine
RPTSPIQIM

SEQ ID NO: 1778 - protein, 9 aa, Artificial Sequence
  Description of Artificial Sequence: Synthetic peptide
  MOD_RES (4)..(4): phosphorylated serine
RPTSRLNRF

SEQ ID NO: 1779 - protein, 9 aa, Artificial Sequence
  Description of Artificial Sequence: Synthetic peptide
  MOD_RES (4)..(4): phosphorylated serine
RPTSRLNRL

SEQ ID NO: 1780 - protein, 9 aa, Artificial Sequence
  Description of Artificial Sequence: Synthetic peptide
  MOD_RES (4)..(4): phosphorylated serine
RPTSRLNRM

SEQ ID NO: 1781 - protein, 9 aa, Artificial Sequence
  Description of Artificial Sequence: Synthetic peptide
  MOD_RES (4)..(4): phosphorylated serine
RPTSRLNRV

SEQ ID NO: 1782 - protein, 9 aa, Artificial Sequence
  Description of Artificial Sequence: Synthetic peptide
  MOD_RES (4)..(4): phosphorylated serine
RPVSPFQEF

SEQ ID NO: 1783 - protein, 9 aa, Artificial Sequence
  Description of Artificial Sequence: Synthetic peptide
  MOD_RES (4)..(4): phosphorylated serine
RPVSPFQEL

SEQ ID NO: 1784 - protein, 9 aa, Artificial Sequence
  Description of Artificial Sequence: Synthetic peptide
  MOD_RES (4)..(4): phosphorylated serine
RPVSPFQEM

SEQ ID NO: 1785 - protein, 9 aa, Artificial Sequence
  Description of Artificial Sequence: Synthetic peptide
  MOD_RES (4)..(4): phosphorylated serine
RPVSPFQEV

SEQ ID NO: 1786 - protein, 9 aa, Artificial Sequence
  Description of Artificial Sequence: Synthetic peptide
  MOD_RES (4)..(4): phosphorylated serine
RPVSPGKDF

SEQ ID NO: 1787 - protein, 9 aa, Artificial Sequence
  Description of Artificial Sequence: Synthetic peptide
  MOD_RES (4)..(4): phosphorylated serine
RPVSPGKDI

SEQ ID NO: 1788 - protein, 9 aa, Artificial Sequence
  Description of Artificial Sequence: Synthetic peptide
  MOD_RES (4)..(4): phosphorylated serine
RPVSPGKDL

SEQ ID NO: 1789 - protein, 9 aa, Artificial Sequence
  Description of Artificial Sequence: Synthetic peptide
  MOD_RES (4)..(4): phosphorylated serine
RPVSPGKDM

SEQ ID NO: 1790 - protein, 9 aa, Artificial Sequence
  Description of Artificial Sequence: Synthetic peptide
  MOD_RES (4)..(4): phosphorylated serine
RPVSPGKDV

SEQ ID NO: 1791 - protein, 9 aa, Artificial Sequence
  Description of Artificial Sequence: Synthetic peptide
  MOD_RES (6)..(6): phosphorylated serine
RPVSPSSLL

SEQ ID NO: 1792 - protein, 10 aa, Artificial Sequence
  Description of Artificial Sequence: Synthetic peptide
  MOD_RES (4)..(4): phosphorylated serine
RPVSTDFAQY

SEQ ID NO: 1793 - protein, 9 aa, Artificial Sequence
  Description of Artificial Sequence: Synthetic peptide
  MOD_RES (4)..(4): phosphorylated threonine
RPVTPVSDF

SEQ ID NO: 1794 - protein, 9 aa, Artificial Sequence
  Description of Artificial Sequence: Synthetic peptide
  MOD_RES (4)..(4): phosphorylated threonine
RPVTPVSDL

SEQ ID NO: 1795 - protein, 9 aa, Artificial Sequence
  Description of Artificial Sequence: Synthetic peptide
  MOD_RES (4)..(4): phosphorylated threonine
RPVTPVSDM

SEQ ID NO: 1796 - protein, 9 aa, Artificial Sequence
  Description of Artificial Sequence: Synthetic peptide
  MOD_RES (4)..(4): phosphorylated threonine
RPVTPVSDV

SEQ ID NO: 1797 - protein, 9 aa, Artificial Sequence
  Description of Artificial Sequence: Synthetic peptide
  MOD_RES (4)..(4): phosphorylated serine
RPWSNSRGL

SEQ ID NO: 1798 - protein, 9 aa, Artificial Sequence
  Description of Artificial Sequence: Synthetic peptide
  MOD_RES (4)..(4): phosphorylated serine
RPWSPAVSA

SEQ ID NO: 1799 - protein, 9 aa, Artificial Sequence
  Description of Artificial Sequence: Synthetic peptide
  MOD_RES (4)..(4): phosphorylated serine
RPWSPAVSF

SEQ ID NO: 1800 - protein, 9 aa, Artificial Sequence
  Description of Artificial Sequence: Synthetic peptide
  MOD_RES (4)..(4): phosphorylated serine
RPWSPAVSL

SEQ ID NO: 1801 - protein, 9 aa, Artificial Sequence
  Description of Artificial Sequence: Synthetic peptide
  MOD_RES (4)..(4): phosphorylated serine
RPWSPAVSM

SEQ ID NO: 1802 - protein, 9 aa, Artificial Sequence
  Description of Artificial Sequence: Synthetic peptide
  MOD_RES (4)..(4): phosphorylated serine
RPWSPAVSV

SEQ ID NO: 1803 - protein, 10 aa, Artificial Sequence
  Description of Artificial Sequence: Synthetic peptide
  MOD_RES (4)..(4): phosphorylated serine
RPYSPPFFSF

SEQ ID NO: 1804 - protein, 10 aa, Artificial Sequence
  Description of Artificial Sequence: Synthetic peptide
  MOD_RES (4)..(4): phosphorylated serine
RPYSPPFFSL

SEQ ID NO: 1805 - protein, 10 aa, Artificial Sequence
  Description of Artificial Sequence: Synthetic peptide
  MOD_RES (4)..(4): phosphorylated serine
RPYSPPFFSM

SEQ ID NO: 1806 - protein, 10 aa, Artificial Sequence
  Description of Artificial Sequence: Synthetic peptide
  MOD_RES (4)..(4): phosphorylated serine
RPYSPPFFSV

SEQ ID NO: 1807 - protein, 9 aa, Artificial Sequence
  Description of Artificial Sequence: Synthetic peptide
  MOD_RES (6)..(6): phosphorylated serine
RPYSPSQAL

SEQ ID NO: 1808 - protein, 10 aa, Artificial Sequence
  Description of Artificial Sequence: Synthetic peptide
  MOD_RES (4)..(4): phosphorylated serine
RPYSPSQYAL

SEQ ID NO: 1809 - protein, 10 aa, Artificial Sequence
  Description of Artificial Sequence: Synthetic peptide
  MOD_RES (6)..(6): phosphorylated serine
RPYSPSQYAL

SEQ ID NO: 1810 - protein, 9 aa, Artificial Sequence
  Description of Artificial Sequence: Synthetic peptide
  MOD_RES (4)..(4): phosphorylated serine
RPYSQVNVL

SEQ ID NO: 1811 - protein, 10 aa, Artificial Sequence
  Description of Artificial Sequence: Synthetic peptide
  MOD_RES (4)..(4): phosphorylated serine
RQASIELPSM

SEQ ID NO: 1812 - protein, 12 aa, Artificial Sequence
  Description of Artificial Sequence: Synthetic peptide
  MOD_RES (4)..(4): phosphorylated serine
RQASIELPSMAV

SEQ ID NO: 1813 - protein, 10 aa, Artificial Sequence
  Description of Artificial Sequence: Synthetic peptide
  MOD_RES (4)..(4): phosphorylated serine
RQASIELPSV

SEQ ID NO: 1814 - protein, 9 aa, Artificial Sequence
  Description of Artificial Sequence: Synthetic peptide
  MOD_RES (4)..(4): phosphorylated serine
RQASLSISV

SEQ ID NO: 1815 - protein, 9 aa, Artificial Sequence
  Description of Artificial Sequence: Synthetic peptide
  MOD_RES (4)..(4): phosphorylated serine
RQASPLVHK

SEQ ID NO: 1816 - protein, 9 aa, Artificial Sequence
  Description of Artificial Sequence: Synthetic peptide
  MOD_RES (4)..(4): phosphorylated serine
RQASPLVHR

SEQ ID NO: 1817 - protein, 9 aa, Artificial Sequence
  Description of Artificial Sequence: Synthetic peptide
  MOD_RES (4)..(4): phosphorylated serine
RQASPLVHY

SEQ ID NO: 1818 - protein, 11 aa, Artificial Sequence
  Description of Artificial Sequence: Synthetic peptide
  MOD_RES (4)..(4): phosphorylated serine
RQDSTPGKVFL

SEQ ID NO: 1819 - protein, 11 aa, Artificial Sequence
  Description of Artificial Sequence: Synthetic peptide
  MOD_RES (5)..(5): phosphorylated threonine
RQDSTPGKVFL

SEQ ID NO: 1820 - protein, 11 aa, Artificial Sequence
  Description of Artificial Sequence: Synthetic peptide
  MOD_RES (4)..(4): phosphorylated serine
RQDSTPGKVFV

SEQ ID NO: 1821 - protein, 9 aa, Artificial Sequence
  Description of Artificial Sequence: Synthetic peptide
  MOD_RES (4)..(4): phosphorylated serine
RQISFKAEV

SEQ ID NO: 1822 - protein, 9 aa, Artificial Sequence
  Description of Artificial Sequence: Synthetic peptide
  MOD_RES (4)..(4): phosphorylated serine
RQISQDVKL

SEQ ID NO: 1823 - protein, 9 aa, Artificial Sequence
  Description of Artificial Sequence: Synthetic peptide
  MOD_RES (4)..(4): phosphorylated serine
RQISQDVKV

SEQ ID NO: 1824 - protein, 9 aa, Artificial Sequence
  Description of Artificial Sequence: Synthetic peptide
  MOD_RES (4)..(4): phosphorylated serine
RQKSPLFQF

SEQ ID NO: 1825 - protein, 9 aa, Artificial Sequence
  Description of Artificial Sequence: Synthetic peptide
  MOD_RES (4)..(4): phosphorylated serine
RQLSALHRA

SEQ ID NO: 1826 - protein, 12 aa, Artificial Sequence
  Description of Artificial Sequence: Synthetic peptide
  MOD_RES (4)..(4): phosphorylated serine
RQLSLEGSGLGV

SEQ ID NO: 1827 - protein, 10 aa, Artificial Sequence
  Description of Artificial Sequence: Synthetic peptide
  MOD_RES (4)..(4): phosphorylated serine
RQLSSGVSEI

SEQ ID NO: 1828 - protein, 10 aa, Artificial Sequence
  Description of Artificial Sequence: Synthetic peptide
  MOD_RES (4)..(4): phosphorylated serine
RQLSSGVSEV

SEQ ID NO: 1829 - protein, 9 aa, Artificial Sequence
  Description of Artificial Sequence: Synthetic peptide
  MOD_RES (4)..(4): phosphorylated serine
RQSSSRFNL

SEQ ID NO: 1830 - protein, 9 aa, Artificial Sequence
  Description of Artificial Sequence: Synthetic peptide
  MOD_RES (4)..(4): phosphorylated serine
RRASFAKSF

SEQ ID NO: 1831 - protein, 9 aa, Artificial Sequence
  Description of Artificial Sequence: Synthetic peptide
  MOD_RES (4)..(4): phosphorylated serine
RRASFAKSK

SEQ ID NO: 1832 - protein, 9 aa, Artificial Sequence
  Description of Artificial Sequence: Synthetic peptide
  MOD_RES (4)..(4): phosphorylated serine
RRASFAKSL

SEQ ID NO: 1833 - protein, 9 aa, Artificial Sequence
  Description of Artificial Sequence: Synthetic peptide
  MOD_RES (4)..(4): phosphorylated serine
RRASFAKSM

SEQ ID NO: 1834 - protein, 9 aa, Artificial Sequence
  Description of Artificial Sequence: Synthetic peptide
  MOD_RES (4)..(4): phosphorylated serine
RRASFAKSR

SEQ ID NO: 1835 - protein, 9 aa, Artificial Sequence
  Description of Artificial Sequence: Synthetic peptide
  MOD_RES (4)..(4): phosphorylated serine
RRASIITKY

SEQ ID NO: 1836 - protein, 10 aa, Artificial Sequence
  Description of Artificial Sequence: Synthetic peptide
  MOD_RES (4)..(4): phosphorylated serine
RRASLSEIGF

SEQ ID NO: 1837 - protein, 10 aa, Artificial Sequence
  Description of Artificial Sequence: Synthetic peptide
  MOD_RES (4)..(4): phosphorylated serine
RRASLSEIGK

SEQ ID NO: 1838 - protein, 10 aa, Artificial Sequence
  Description of Artificial Sequence: Synthetic peptide
  MOD_RES (4)..(4): phosphorylated serine
RRASLSEIGY

SEQ ID NO: 1839 - protein, 9 aa, Artificial Sequence
  Description of Artificial Sequence: Synthetic peptide
  MOD_RES (4)..(4): phosphorylated serine
RRASQEANL

SEQ ID NO: 1840 - protein, 9 aa, Artificial Sequence
  Description of Artificial Sequence: Synthetic peptide
  MOD_RES (5)..(5): phosphorylated serine
RRASSPFRF

SEQ ID NO: 1841 - protein, 9 aa, Artificial Sequence
  Description of Artificial Sequence: Synthetic peptide
  MOD_RES (5)..(5): phosphorylated serine
RRASSPFRK

SEQ ID NO: 1842 - protein, 9 aa, Artificial Sequence
  Description of Artificial Sequence: Synthetic peptide
  MOD_RES (5)..(5): phosphorylated serine
RRASSPFRL

SEQ ID NO: 1843 - protein, 9 aa, Artificial Sequence
  Description of Artificial Sequence: Synthetic peptide
  MOD_RES (5)..(5): phosphorylated serine
RRASSPFRM

SEQ ID NO: 1844 - protein, 9 aa, Artificial Sequence
  Description of Artificial Sequence: Synthetic peptide
  MOD_RES (5)..(5): phosphorylated serine
RRASSPFRR

SEQ ID NO: 1845 - protein, 9 aa, Artificial Sequence
  Description of Artificial Sequence: Synthetic peptide
  MOD_RES (4)..(4): phosphorylated serine
RRASVFVKF

SEQ ID NO: 1846 - protein, 9 aa, Artificial Sequence
  Description of Artificial Sequence: Synthetic peptide
  MOD_RES (4)..(4): phosphorylated serine
RRASVFVKK

SEQ ID NO: 1847 - protein, 9 aa, Artificial Sequence
  Description of Artificial Sequence: Synthetic peptide
  MOD_RES (4)..(4): phosphorylated serine
RRASVFVKL

SEQ ID NO: 1848 - protein, 9 aa, Artificial Sequence
  Description of Artificial Sequence: Synthetic peptide
  MOD_RES (4)..(4): phosphorylated serine
RRASVFVKM

SEQ ID NO: 1849 - protein, 9 aa, Artificial Sequence
  Description of Artificial Sequence: Synthetic peptide
  MOD_RES (4)..(4): phosphorylated serine
RRASVFVKR

SEQ ID NO: 1850 - protein, 9 aa, Artificial Sequence
  Description of Artificial Sequence: Synthetic peptide
  MOD_RES (4)..(4): phosphorylated serine
RRDSIVAEF

SEQ ID NO: 1851 - protein, 9 aa, Artificial Sequence
  Description of Artificial Sequence: Synthetic peptide
  MOD_RES (4)..(4): phosphorylated serine
RRDSIVAEK

SEQ ID NO: 1852 - protein, 9 aa, Artificial Sequence
  Description of Artificial Sequence: Synthetic peptide
  MOD_RES (4)..(4): phosphorylated serine
RRDSIVAEL

SEQ ID NO: 1853 - protein, 9 aa, Artificial Sequence
  Description of Artificial Sequence: Synthetic peptide
  MOD_RES (4)..(4): phosphorylated serine
RRDSIVAER

SEQ ID NO: 1854 - protein, 9 aa, Artificial Sequence
  Description of Artificial Sequence: Synthetic peptide
  MOD_RES (4)..(4): phosphorylated serine
RRDSIVAEY

SEQ ID NO: 1855 - protein, 10 aa, Artificial Sequence
  Description of Artificial Sequence: Synthetic peptide
  MOD_RES (4)..(4): phosphorylated serine
RRDSLQKPGL

SEQ ID NO: 1856 - protein, 9 aa, Artificial Sequence
  Description of Artificial Sequence: Synthetic peptide
  MOD_RES (4)..(4): phosphorylated serine
RRFSFEVTL

SEQ ID NO: 1857 - protein, 7 aa, Artificial Sequence
  Description of Artificial Sequence: Synthetic peptide
  MOD_RES (4)..(4): phosphorylated serine
RRFSFKF

SEQ ID NO: 1858 - protein, 7 aa, Artificial Sequence
  Description of Artificial Sequence: Synthetic peptide
  MOD_RES (4)..(4): phosphorylated serine
RRFSFKK

SEQ ID NO: 1859 - protein, 9 aa, Artificial Sequence
  Description of Artificial Sequence: Synthetic peptide
  MOD_RES (4)..(4): phosphorylated serine
RRFSFKKSF

SEQ ID NO: 1860 - protein, 9 aa, Artificial Sequence
  Description of Artificial Sequence: Synthetic peptide
  MOD_RES (4)..(4): phosphorylated serine
RRFSFKKSK

SEQ ID NO: 1861 - protein, 9 aa, Artificial Sequence
  Description of Artificial Sequence: Synthetic peptide
  MOD_RES (4)..(4): phosphorylated serine
RRFSFKKSL

SEQ ID NO: 1862 - protein, 9 aa, Artificial Sequence
  Description of Artificial Sequence: Synthetic peptide
  MOD_RES (4)..(4): phosphorylated serine
RRFSFKKSM

SEQ ID NO: 1863 - protein, 9 aa, Artificial Sequence
  Description of Artificial Sequence: Synthetic peptide
  MOD_RES (4)..(4): phosphorylated serine
RRFSFKKSR

SEQ ID NO: 1864 - protein, 7 aa, Artificial Sequence
  Description of Artificial Sequence: Synthetic peptide
  MOD_RES (4)..(4): phosphorylated serine
RRFSFKL

SEQ ID NO: 1865 - protein, 7 aa, Artificial Sequence
  Description of Artificial Sequence: Synthetic peptide
  MOD_RES (4)..(4): phosphorylated serine
RRFSFKM

SEQ ID NO: 1866 - protein, 7 aa, Artificial Sequence
  Description of Artificial Sequence: Synthetic peptide
  MOD_RES (4)..(4): phosphorylated serine
RRFSFKR

SEQ ID NO: 1867 - protein, 9 aa, Artificial Sequence
  Description of Artificial Sequence: Synthetic peptide
  MOD_RES (4)..(4): phosphorylated serine
RRFSGTAVY

SEQ ID NO: 1868 - protein, 9 aa, Artificial Sequence
  Description of Artificial Sequence: Synthetic peptide
  MOD_RES (4)..(4): phosphorylated serine
RRFSGTVRF

SEQ ID NO: 1869 - protein, 9 aa, Artificial Sequence
  Description of Artificial Sequence: Synthetic peptide
  MOD_RES (4)..(4): phosphorylated serine
RRFSGTVRK

SEQ ID NO: 1870 - protein, 9 aa, Artificial Sequence
  Description of Artificial Sequence: Synthetic peptide
  MOD_RES (4)..(4): phosphorylated serine
RRFSGTVRL

SEQ ID NO: 1871 - protein, 9 aa, Artificial Sequence
  Description of Artificial Sequence: Synthetic peptide
  MOD_RES (4)..(4): phosphorylated serine
RRFSGTVRM

SEQ ID NO: 1872 - protein, 9 aa, Artificial Sequence
  Description of Artificial Sequence: Synthetic peptide
  MOD_RES (4)..(4): phosphorylated serine
RRFSGTVRR

SEQ ID NO: 1873 - protein, 9 aa, Artificial Sequence
  Description of Artificial Sequence: Synthetic peptide
  MOD_RES (4)..(4): phosphorylated serine
RRFSIATLR

SEQ ID NO: 1874 - protein, 9 aa, Artificial Sequence
  Description of Artificial Sequence: Synthetic peptide
  MOD_RES (4)..(4): phosphorylated serine
RRFSLTTLR

SEQ ID NO: 1875 - protein, 11 aa, Artificial Sequence
  Description of Artificial Sequence: Synthetic peptide
  MOD_RES (4)..(4): phosphorylated serine
RRFSPDDKYSF

SEQ ID NO: 1876 - protein, 11 aa, Artificial Sequence
  Description of Artificial Sequence: Synthetic peptide
  MOD_RES (4)..(4): phosphorylated serine
RRFSPDDKYSK

SEQ ID NO: 1877 - protein, 11 aa, Artificial Sequence
  Description of Artificial Sequence: Synthetic peptide
  MOD_RES (4)..(4): phosphorylated serine
RRFSPDDKYSL

SEQ ID NO: 1878 - protein, 11 aa, Artificial Sequence
  Description of Artificial Sequence: Synthetic peptide
  MOD_RES (4)..(4): phosphorylated serine
RRFSPDDKYSM

SEQ ID NO: 1879 - protein, 9 aa, Artificial Sequence
  Description of Artificial Sequence: Synthetic peptide
  MOD_RES (4)..(4): phosphorylated serine
RRFSPPRRF

SEQ ID NO: 1880 - protein, 9 aa, Artificial Sequence
  Description of Artificial Sequence: Synthetic peptide
  MOD_RES (4)..(4): phosphorylated serine
RRFSPPRRK

SEQ ID NO: 1881 - protein, 9 aa, Artificial Sequence
  Description of Artificial Sequence: Synthetic peptide
  MOD_RES (4)..(4): phosphorylated serine
RRFSPPRRL

SEQ ID NO: 1882 - protein, 9 aa, Artificial Sequence
  Description of Artificial Sequence: Synthetic peptide
  MOD_RES (4)..(4): phosphorylated serine
  MOD_RES (9)..(9): oxidized methionine
RRFSPPRRM

SEQ ID NO: 1883 - protein, 9 aa, Artificial Sequence
  Description of Artificial Sequence: Synthetic peptide
  MOD_RES (4)..(4): phosphorylated serine
RRFSPPRRM

SEQ ID NO: 1884 - protein, 9 aa, Artificial Sequence
  Description of Artificial Sequence: Synthetic peptide
  MOD_RES (4)..(4): phosphorylated serine
RRFSPPRRR

SEQ ID NO: 1885 - protein, 9 aa, Artificial Sequence
  Description of Artificial Sequence: Synthetic peptide
  MOD_RES (4)..(4): phosphorylated serine
RRFSPPRRY

SEQ ID NO: 1886 - protein, 10 aa, Artificial Sequence
  Description of Artificial Sequence: Synthetic peptide
  MOD_RES (4)..(4): phosphorylated serine
RRFSRLENRY

SEQ ID NO: 1887 - protein, 9 aa, Artificial Sequence
  Description of Artificial Sequence: Synthetic peptide
  MOD_RES (4)..(4): phosphorylated serine
RRFSRSDEL

SEQ ID NO: 1888 - protein, 9 aa, Artificial Sequence
  Description of Artificial Sequence: Synthetic peptide
  MOD_RES (4)..(4): phosphorylated serine
  MOD_RES (6)..(6): phosphorylated serine
RRFSRSPIF

SEQ ID NO: 1889 - protein, 9 aa, Artificial Sequence
  Description of Artificial Sequence: Synthetic peptide
  MOD_RES (4)..(4): phosphorylated serine
RRFSRSPIF

SEQ ID NO: 1890 - protein, 9 aa, Artificial Sequence
  Description of Artificial Sequence: Synthetic peptide
  MOD_RES (4)..(4): phosphorylated serine
  MOD_RES (6)..(6): phosphorylated serine
RRFSRSPIK

SEQ ID NO: 1891 - protein, 9 aa, Artificial Sequence
  Description of Artificial Sequence: Synthetic peptide
  MOD_RES (4)..(4): phosphorylated serine
RRFSRSPIK

SEQ ID NO: 1892 - protein, 9 aa, Artificial Sequence
  Description of Artificial Sequence: Synthetic peptide
  MOD_RES (4)..(4): phosphorylated serine
  MOD_RES (6)..(6): phosphorylated serine
RRFSRSPIL

SEQ ID NO: 1893 - protein, 9 aa, Artificial Sequence
  Description of Artificial Sequence: Synthetic peptide
  MOD_RES (4)..(4): phosphorylated serine
RRFSRSPIL

SEQ ID NO: 1894 - protein, 9 aa, Artificial Sequence
  Description of Artificial Sequence: Synthetic peptide
  MOD_RES (4)..(4): phosphorylated serine
RRFSRSPIM

SEQ ID NO: 1895 - protein, 9 aa, Artificial Sequence
  Description of Artificial Sequence: Synthetic peptide
  MOD_RES (4)..(4): phosphorylated serine
  MOD_RES (6)..(6): phosphorylated serine
RRFSRSPIR

SEQ ID NO: 1896 - protein, 9 aa, Artificial Sequence
  Description of Artificial Sequence: Synthetic peptide
  MOD_RES (4)..(4): phosphorylated serine
RRFSRSPIR

SEQ ID NO: 1897 - protein, 9 aa, Artificial Sequence
  Description of Artificial Sequence: Synthetic peptide
  MOD_RES (6)..(6): phosphorylated serine
RRFSRSPIR

SEQ ID NO: 1898 - protein, 10 aa, Artificial Sequence
  Description of Artificial Sequence: Synthetic peptide
  MOD_RES (4)..(4): phosphorylated serine
  MOD_RES (6)..(6): phosphorylated serine
RRFSRSPIRF

SEQ ID NO: 1899 - protein, 10 aa, Artificial Sequence
  Description of Artificial Sequence: Synthetic peptide
  MOD_RES (4)..(4): phosphorylated serine
RRFSRSPIRF

SEQ ID NO: 1900 - protein, 10 aa, Artificial Sequence
  Description of Artificial Sequence: Synthetic peptide
  MOD_RES (4)..(4): phosphorylated serine
  MOD_RES (6)..(6): phosphorylated serine
RRFSRSPIRK

SEQ ID NO: 1901 - protein, 10 aa, Artificial Sequence
  Description of Artificial Sequence: Synthetic peptide
  MOD_RES (4)..(4): phosphorylated serine
RRFSRSPIRK

SEQ ID NO: 1902 - protein, 10 aa, Artificial Sequence
  Description of Artificial Sequence: Synthetic peptide
  MOD_RES (4)..(4): phosphorylated serine
  MOD_RES (6)..(6): phosphorylated serine
RRFSRSPIRL

SEQ ID NO: 1903 - protein, 10 aa, Artificial Sequence
  Description of Artificial Sequence: Synthetic peptide
  MOD_RES (4)..(4): phosphorylated serine
RRFSRSPIRL

SEQ ID NO: 1904 - protein, 10 aa, Artificial Sequence
  Description of Artificial Sequence: Synthetic peptide
  MOD_RES (4)..(4): phosphorylated serine
  MOD_RES (6)..(6): phosphorylated serine
RRFSRSPIRR

SEQ ID NO: 1905 - protein, 10 aa, Artificial Sequence
  Description of Artificial Sequence: Synthetic peptide
  MOD_RES (4)..(4): phosphorylated serine
RRFSRSPIRR

SEQ ID NO: 1906 - protein, 10 aa, Artificial Sequence
  Description of Artificial Sequence: Synthetic peptide
  MOD_RES (4)..(4): phosphorylated serine
  MOD_RES (6)..(6): phosphorylated serine
RRFSRSPIRY

SEQ ID NO: 1907 - protein, 10 aa, Artificial Sequence
  Description of Artificial Sequence: Synthetic peptide
  MOD_RES (4)..(4): phosphorylated serine
RRFSRSPIRY

SEQ ID NO: 1908 - protein, 9 aa, Artificial Sequence
  Description of Artificial Sequence: Synthetic peptide
  MOD_RES (4)..(4): phosphorylated serine
  MOD_RES (6)..(6): phosphorylated serine
RRFSRSPIY

SEQ ID NO: 1909 - protein, 9 aa, Artificial Sequence
  Description of Artificial Sequence: Synthetic peptide
  MOD_RES (4)..(4): phosphorylated serine
RRFSRSPIY

SEQ ID NO: 1910 - protein, 8 aa, Artificial Sequence
  Description of Artificial Sequence: Synthetic peptide
  MOD_RES (4)..(4): phosphorylated serine
RRFSRSPK

SEQ ID NO: 1911 - protein, 10 aa, Artificial Sequence
  Description of Artificial Sequence: Synthetic peptide
  MOD_RES (5)..(5): phosphorylated serine
RRFSSPPRRM

SEQ ID NO: 1912 - protein, 9 aa, Artificial Sequence
  Description of Artificial Sequence: Synthetic peptide
  MOD_RES (4)..(4): phosphorylated serine
RRFSVSTLR

SEQ ID NO: 1913 - protein, 9 aa, Artificial Sequence
  Description of Artificial Sequence: Synthetic peptide
  MOD_RES (4)..(4): phosphorylated serine
RRFSVTTMR

SEQ ID NO: 1914 - protein, 10 aa, Artificial Sequence
  Description of Artificial Sequence: Synthetic peptide
  MOD_RES (4)..(4): phosphorylated threonine
RRFTPPSPAF

SEQ ID NO: 1915 - protein, 10 aa, Artificial Sequence
  Description of Artificial Sequence: Synthetic peptide
  MOD_RES (4)..(4): phosphorylated threonine
RRFTPPSPAK

SEQ ID NO: 1916 - protein, 10 aa, Artificial Sequence
  Description of Artificial Sequence: Synthetic peptide
  MOD_RES (4)..(4): phosphorylated threonine
RRFTPPSPAR

SEQ ID NO: 1917 - protein, 10 aa, Artificial Sequence
  Description of Artificial Sequence: Synthetic peptide
  MOD_RES (4)..(4): phosphorylated threonine
RRFTPPSPAY

SEQ ID NO: 1918 - protein, 9 aa, Artificial Sequence
  Description of Artificial Sequence: Synthetic peptide
  MOD_RES (4)..(4): phosphorylated serine
RRGSFEVTL

SEQ ID NO: 1919 - protein, 11 aa, Artificial Sequence
  Description of Artificial Sequence: Synthetic peptide
  MOD_RES (4)..(4): phosphorylated serine
RRHSASNLHAL

SEQ ID NO: 1920 - protein, 10 aa, Artificial Sequence
  Description of Artificial Sequence: Synthetic peptide
  MOD_RES (6)..(6): phosphorylated serine
RRIDISPSTF

SEQ ID NO: 1921 - protein, 10 aa, Artificial Sequence
  Description of Artificial Sequence: Synthetic peptide
  MOD_RES (6)..(6): phosphorylated serine
RRIDISPSTK

SEQ ID NO: 1922 - protein, 11 aa, Artificial Sequence
  Description of Artificial Sequence: Synthetic peptide
  MOD_RES (6)..(6): phosphorylated serine
RRIDISPSTLR

SEQ ID NO: 1923 - protein, 12 aa, Artificial Sequence
  Description of Artificial Sequence: Synthetic peptide
  MOD_RES (6)..(6): phosphorylated serine
RRIDISPSTLRK

SEQ ID NO: 1924 - protein, 10 aa, Artificial Sequence
  Description of Artificial Sequence: Synthetic peptide
  MOD_RES (6)..(6): phosphorylated serine
RRIDISPSTR

SEQ ID NO: 1925 - protein, 10 aa, Artificial Sequence
  Description of Artificial Sequence: Synthetic peptide
  MOD_RES (6)..(6): phosphorylated serine
RRIDISPSTY

SEQ ID NO: 1926 - protein, 9 aa, Artificial Sequence
  Description of Artificial Sequence: Synthetic peptide
  MOD_RES (4)..(4): phosphorylated serine
RRISDPEVF

SEQ ID NO: 1927 - protein, 9 aa, Artificial Sequence
  Description of Artificial Sequence: Synthetic peptide
  MOD_RES (4)..(4): phosphorylated serine
RRISDPQVF

SEQ ID NO: 1928 - protein, 9 aa, Artificial Sequence
  Description of Artificial Sequence: Synthetic peptide
  MOD_RES (4)..(4): phosphorylated serine
RRISGVDRF

SEQ ID NO: 1929 - protein, 9 aa, Artificial Sequence
  Description of Artificial Sequence: Synthetic peptide
  MOD_RES (4)..(4): phosphorylated serine
RRISGVDRK

SEQ ID NO: 1930 - protein, 9 aa, Artificial Sequence
  Description of Artificial Sequence: Synthetic peptide
  MOD_RES (4)..(4): phosphorylated serine
RRISGVDRL

SEQ ID NO: 1931 - protein, 9 aa, Artificial Sequence
  Description of Artificial Sequence: Synthetic peptide
  MOD_RES (4)..(4): phosphorylated serine
RRISGVDRM

SEQ ID NO: 1932 - protein, 9 aa, Artificial Sequence
  Description of Artificial Sequence: Synthetic peptide
  MOD_RES (4)..(4): phosphorylated serine
RRISGVDRR

SEQ ID NO: 1933 - protein, 9 aa, Artificial Sequence
  Description of Artificial Sequence: Synthetic peptide
  MOD_RES (4)..(4): phosphorylated serine
RRISGVDRY

SEQ ID NO: 1934 - protein, 10 aa, Artificial Sequence
  Description of Artificial Sequence: Synthetic peptide
  MOD_RES (4)..(4): phosphorylated serine
RRISGVDRYF

SEQ ID NO: 1935 - protein, 10 aa, Artificial Sequence
  Description of Artificial Sequence: Synthetic peptide
  MOD_RES (4)..(4): phosphorylated serine
RRISGVDRYK

SEQ ID NO: 1936 - protein, 10 aa, Artificial Sequence
  Description of Artificial Sequence: Synthetic peptide
  MOD_RES (4)..(4): phosphorylated serine
RRISGVDRYL

SEQ ID NO: 1937 - protein, 10 aa, Artificial Sequence
  Description of Artificial Sequence: Synthetic peptide
  MOD_RES (4)..(4): phosphorylated serine
RRISGVDRYR

SEQ ID NO: 1938 - protein, 10 aa, Artificial Sequence
  Description of Artificial Sequence: Synthetic peptide
  MOD_RES (4)..(4): phosphorylated serine
RRISGVDRYY

SEQ ID NO: 1939 - protein, 9 aa, Artificial Sequence
  Description of Artificial Sequence: Synthetic peptide
  MOD_RES (4)..(4): phosphorylated serine
RRISPAPQR

SEQ ID NO: 1940 - protein, 9 aa, Artificial Sequence
  Description of Artificial Sequence: Synthetic peptide
  MOD_RES (4)..(4): phosphorylated serine
RRISQIQQL

SEQ ID NO: 1941 - protein, 9 aa, Artificial Sequence
  Description of Artificial Sequence: Synthetic peptide
  MOD_RES (4)..(4): phosphorylated serine
RRKSQVAEF

SEQ ID NO: 1942 - protein, 9 aa, Artificial Sequence
  Description of Artificial Sequence: Synthetic peptide
  MOD_RES (4)..(4): phosphorylated serine
RRKSQVAEK

SEQ ID NO: 1943 - protein, 9 aa, Artificial Sequence
  Description of Artificial Sequence: Synthetic peptide
  MOD_RES (4)..(4): phosphorylated serine
RRKSPPPSF

SEQ ID NO: 1944 - protein, 9 aa, Artificial Sequence
  Description of Artificial Sequence: Synthetic peptide
  MOD_RES (4)..(4): phosphorylated serine
RRKSPPPSK

SEQ ID NO: 1945 - protein, 9 aa, Artificial Sequence
  Description of Artificial Sequence: Synthetic peptide
  MOD_RES (4)..(4): phosphorylated serine
RRKSPPPSL

SEQ ID NO: 1946 - protein, 9 aa, Artificial Sequence
  Description of Artificial Sequence: Synthetic peptide
  MOD_RES (4)..(4): phosphorylated serine
RRKSPPPSM

SEQ ID NO: 1947 - protein, 9 aa, Artificial Sequence
  Description of Artificial Sequence: Synthetic peptide
  MOD_RES (4)..(4): phosphorylated serine
RRKSPPPSR

SEQ ID NO: 1948 - protein, 9 aa, Artificial Sequence
  Description of Artificial Sequence: Synthetic peptide
  MOD_RES (4)..(4): phosphorylated serine
RRKSQLDSF

SEQ ID NO: 1949 - protein, 9 aa, Artificial Sequence
  Description of Artificial Sequence: Synthetic peptide
  MOD_RES (4)..(4): phosphorylated serine
RRKSQLDSK

SEQ ID NO: 1950 - protein, 9 aa, Artificial Sequence
  Description of Artificial Sequence: Synthetic peptide
  MOD_RES (4)..(4): phosphorylated serine
RRKSQLDSL

SEQ ID NO: 1951 - protein, 9 aa, Artificial Sequence
  Description of Artificial Sequence: Synthetic peptide
  MOD_RES (4)..(4): phosphorylated serine
RRKSQLDSM

SEQ ID NO: 1952 - protein, 9 aa, Artificial Sequence
  Description of Artificial Sequence: Synthetic peptide
  MOD_RES (4)..(4): phosphorylated serine
RRKSQLDSR

SEQ ID NO: 1953 - protein, 9 aa, Artificial Sequence
  Description of Artificial Sequence: Synthetic peptide
  MOD_RES (4)..(4): phosphorylated serine
RRKSQLDSY

SEQ ID NO: 1954 - protein, 9 aa, Artificial Sequence
  Description of Artificial Sequence: Synthetic peptide
  MOD_RES (4)..(4): phosphorylated serine
RRKSQVAEF

SEQ ID NO: 1955 - protein, 9 aa, Artificial Sequence
  Description of Artificial Sequence: Synthetic peptide
  MOD_RES (4)..(4): phosphorylated serine
RRKSQVAEK

SEQ ID NO: 1956 - protein, 9 aa, Artificial Sequence
  Description of Artificial Sequence: Synthetic peptide
  MOD_RES (4)..(4): phosphorylated serine
RRKSQVAEL

SEQ ID NO: 1957 - protein, 9 aa, Artificial Sequence
  Description of Artificial Sequence: Synthetic peptide
  MOD_RES (4)..(4): phosphorylated serine
RRKSQVAEM

SEQ ID NO: 1958 - protein, 9 aa, Artificial Sequence
  Description of Artificial Sequence: Synthetic peptide
  MOD_RES (4)..(4): phosphorylated serine
RRKSQVAER

SEQ ID NO: 1959 - protein, 9 aa, Artificial Sequence
  Description of Artificial Sequence: Synthetic peptide
  MOD_RES (4)..(4): phosphorylated serine
RRKSQVAEV

SEQ ID NO: 1960 - protein, 9 aa, Artificial Sequence
  Description of Artificial Sequence: Synthetic peptide
  MOD_RES (4)..(4): phosphorylated serine
RRKSQVAEY

SEQ ID NO: 1961 - protein, 9 aa, Artificial Sequence
  Description of Artificial Sequence: Synthetic peptide
  MOD_RES (5)..(5): phosphorylated serine
RRLGSPHRF

SEQ ID NO: 1962 - protein, 9 aa, Artificial Sequence
  Description of Artificial Sequence: Synthetic peptide
  MOD_RES (5)..(5): phosphorylated serine
RRLGSPHRK

SEQ ID NO: 1963 - protein, 9 aa, Artificial Sequence
  Description of Artificial Sequence: Synthetic peptide
  MOD_RES (5)..(5): phosphorylated serine
RRLGSPHRL

SEQ ID NO: 1964 - protein, 9 aa, Artificial Sequence
  Description of Artificial Sequence: Synthetic peptide
  MOD_RES (5)..(5): phosphorylated serine
RRLGSPHRM

SEQ ID NO: 1965 - protein, 9 aa, Artificial Sequence
  Description of Artificial Sequence: Synthetic peptide
  MOD_RES (5)..(5): phosphorylated serine
RRLGSPHRR

SEQ ID NO: 1966 - protein, 9 aa, Artificial Sequence
  Description of Artificial Sequence: Synthetic peptide
  MOD_RES (4)..(4): phosphorylated serine
RRLSADIRF

SEQ ID NO: 1967 - protein, 9 aa, Artificial Sequence
  Description of Artificial Sequence: Synthetic peptide
  MOD_RES (4)..(4): phosphorylated serine
RRLSADIRK

SEQ ID NO: 1968 - protein, 9 aa, Artificial Sequence
  Description of Artificial Sequence: Synthetic peptide
  MOD_RES (4)..(4): phosphorylated serine
RRLSADIRL

SEQ ID NO: 1969 - protein, 9 aa, Artificial Sequence
  Description of Artificial Sequence: Synthetic peptide
  MOD_RES (4)..(4): phosphorylated serine
RRLSADIRM

SEQ ID NO: 1970 - protein, 9 aa, Artificial Sequence
  Description of Artificial Sequence: Synthetic peptide
  MOD_RES (4)..(4): phosphorylated serine
RRLSADIRR

SEQ ID NO: 1971 - protein, 9 aa, Artificial Sequence
  Description of Artificial Sequence: Synthetic peptide
  MOD_RES (4)..(4): phosphorylated serine
RRLSADIRY

SEQ ID NO: 1972 - protein, 9 aa, Artificial Sequence
  Description of Artificial Sequence: Synthetic peptide
  MOD_RES (4)..(4): phosphorylated serine
RRLSDSPVF

SEQ ID NO: 1973 - protein, 9 aa, Artificial Sequence
  Description of Artificial Sequence: Synthetic peptide
  MOD_RES (4)..(4): phosphorylated serine
RRLSELLRY

SEQ ID NO: 1974 - protein, 9 aa, Artificial Sequence
  Description of Artificial Sequence: Synthetic peptide
  MOD_RES (4)..(4): phosphorylated serine
RRLSERETR

SEQ ID NO: 1975 - protein, 9 aa, Artificial Sequence
  Description of Artificial Sequence: Synthetic peptide
  MOD_RES (4)..(4): phosphorylated serine
RRLSESSAL

SEQ ID NO: 1976 - protein, 9 aa, Artificial Sequence
  Description of Artificial Sequence: Synthetic peptide
  MOD_RES (4)..(4): phosphorylated serine
RRLSFLVSF

SEQ ID NO: 1977 - protein, 9 aa, Artificial Sequence
  Description of Artificial Sequence: Synthetic peptide
  MOD_RES (4)..(4): phosphorylated serine
RRLSFLVSK

SEQ ID NO: 1978 - protein, 9 aa, Artificial Sequence
  Description of Artificial Sequence: Synthetic peptide
  MOD_RES (4)..(4): phosphorylated serine
RRLSFLVSL

SEQ ID NO: 1979 - protein, 9 aa, Artificial Sequence
  Description of Artificial Sequence: Synthetic peptide
  MOD_RES (4)..(4): phosphorylated serine
RRLSFLVSM

SEQ ID NO: 1980 - protein, 9 aa, Artificial Sequence
  Description of Artificial Sequence: Synthetic peptide
  MOD_RES (4)..(4): phosphorylated serine
RRLSFLVSR

SEQ ID NO: 1981 - protein, 9 aa, Artificial Sequence
  Description of Artificial Sequence: Synthetic peptide
  MOD_RES (4)..(4): phosphorylated serine
RRLSFLVSY

SEQ ID NO: 1982 - protein, 10 aa, Artificial Sequence
  Description of Artificial Sequence: Synthetic peptide
  MOD_RES (4)..(4): phosphorylated serine
RRLSGGSHSF

SEQ ID NO: 1983 - protein, 10 aa, Artificial Sequence
  Description of Artificial Sequence: Synthetic peptide
  MOD_RES (4)..(4): phosphorylated serine
RRLSGGSHSK

SEQ ID NO: 1984 - protein, 10 aa, Artificial Sequence
  Description of Artificial Sequence: Synthetic peptide
  MOD_RES (4)..(4): phosphorylated serine
RRLSGGSHSL

SEQ ID NO: 1985 - protein, 10 aa, Artificial Sequence
  Description of Artificial Sequence: Synthetic peptide
  MOD_RES (4)..(4): phosphorylated serine
RRLSGGSHSM

SEQ ID NO: 1986 - protein, 10 aa, Artificial Sequence
  Description of Artificial Sequence: Synthetic peptide
  MOD_RES (4)..(4): phosphorylated serine
RRLSGGSHSR

SEQ ID NO: 1987 - protein, 10 aa, Artificial Sequence
  Description of Artificial Sequence: Synthetic peptide
  MOD_RES (4)..(4): phosphorylated serine
RRLSGGSHSY

SEQ ID NO: 1988 - protein, 10 aa, Artificial Sequence
  Description of Artificial Sequence: Synthetic peptide
  MOD_RES (4)..(4): phosphorylated serine
RRLSGPLHTF

SEQ ID NO: 1989 - protein, 10 aa, Artificial Sequence
  Description of Artificial Sequence: Synthetic peptide
  MOD_RES (4)..(4): phosphorylated serine
RRLSGPLHTK

SEQ ID NO: 1990 - protein, 10 aa, Artificial Sequence
  Description of Artificial Sequence: Synthetic peptide
  MOD_RES (4)..(4): phosphorylated serine
RRLSGPLHTL

SEQ ID NO: 1991 - protein, 10 aa, Artificial Sequence
  Description of Artificial Sequence: Synthetic peptide
  MOD_RES (4)..(4): phosphorylated serine
RRLSGPLHTM

SEQ ID NO: 1992 - protein, 10 aa, Artificial Sequence
  Description of Artificial Sequence: Synthetic peptide
  MOD_RES (4)..(4): phosphorylated serine
RRLSGPLHTR

SEQ ID NO: 1993 - protein, 10 aa, Artificial Sequence
  Description of Artificial Sequence: Synthetic peptide
  MOD_RES (4)..(4): phosphorylated serine
RRLSGPLHTV

SEQ ID NO: 1994 - protein, 10 aa, Artificial Sequence
  Description of Artificial Sequence: Synthetic peptide
  MOD_RES (4)..(4): phosphorylated serine
RRLSGPLHTY

SEQ ID NO: 1995 - protein, 9 aa, Artificial Sequence
  Description of Artificial Sequence: Synthetic peptide
  MOD_RES (4)..(4): phosphorylated serine
RRLSLFLNV

SEQ ID NO: 1996 - protein, 9 aa, Artificial Sequence
  Description of Artificial Sequence: Synthetic peptide
  MOD_RES (4)..(4): phosphorylated serine
RRLSNLPTF

SEQ ID NO: 1997 - protein, 9 aa, Artificial Sequence
  Description of Artificial Sequence: Synthetic peptide
  MOD_RES (4)..(4): phosphorylated serine
RRLSNLPTK

SEQ ID NO: 1998 - protein, 9 aa, Artificial Sequence
  Description of Artificial Sequence: Synthetic peptide
  MOD_RES (4)..(4): phosphorylated serine
RRLSNLPTR

SEQ ID NO: 1999 - protein, 9 aa, Artificial Sequence
  Description of Artificial Sequence: Synthetic peptide
  MOD_RES (4)..(4): phosphorylated serine
RRLSNLPTV

SEQ ID NO: 2000 - protein, 9 aa, Artificial Sequence
  Description of Artificial Sequence: Synthetic peptide
  MOD_RES (4)..(4): phosphorylated serine
RRLSNLPTY

SEQ ID NO: 2001 - protein, 9 aa, Artificial Sequence
  Description of Artificial Sequence: Synthetic peptide
  MOD_RES (4)..(4): phosphorylated serine
RRLSPAPQF

SEQ ID NO: 2002 - protein, 9 aa, Artificial Sequence
  Description of Artificial Sequence: Synthetic peptide
  MOD_RES (4)..(4): phosphorylated serine
RRLSPAPQK

SEQ ID NO: 2003 - protein, 9 aa, Artificial Sequence
  Description of Artificial Sequence: Synthetic peptide
  MOD_RES (4)..(4): phosphorylated serine
RRLSPAPQL

SEQ ID NO: 2004 - protein, 9 aa, Artificial Sequence
  Description of Artificial Sequence: Synthetic peptide
  MOD_RES (4)..(4): phosphorylated serine
RRLSPAPQM

SEQ ID NO: 2005 - protein, 11 aa, Artificial Sequence
  Description of Artificial Sequence: Synthetic peptide
  MOD_RES (4)..(4): phosphorylated serine
RRLSPKASQVF

SEQ ID NO: 2006 - protein, 11 aa, Artificial Sequence
  Description of Artificial Sequence: Synthetic peptide
  MOD_RES (4)..(4): phosphorylated serine
RRLSPKASQVK

SEQ ID NO: 2007 - protein, 11 aa, Artificial Sequence
  Description of Artificial Sequence: Synthetic peptide
  MOD_RES (4)..(4): phosphorylated serine
RRLSPKASQVL

SEQ ID NO: 2008 - protein, 11 aa, Artificial Sequence
  Description of Artificial Sequence: Synthetic peptide
  MOD_RES (4)..(4): phosphorylated serine
RRLSPKASQVM

SEQ ID NO: 2009 - protein, 11 aa, Artificial Sequence
  Description of Artificial Sequence: Synthetic peptide
  MOD_RES (4)..(4): phosphorylated serine
RRLSPKASQVR

SEQ ID NO: 2010 - protein, 10 aa, Artificial Sequence
  Description of Artificial Sequence: Synthetic peptide
  MOD_RES (4)..(4): phosphorylated serine
RRLSPVPVPF

SEQ ID NO: 2011 - protein, 10 aa, Artificial Sequence
  Description of Artificial Sequence: Synthetic peptide
  MOD_RES (4)..(4): phosphorylated serine
RRLSPVPVPK

SEQ ID NO: 2012 - protein, 10 aa, Artificial Sequence
  Description of Artificial Sequence: Synthetic peptide
  MOD_RES (4)..(4): phosphorylated serine
RRLSPVPVPL

SEQ ID NO: 2013 - protein, 10 aa, Artificial Sequence
  Description of Artificial Sequence: Synthetic peptide
  MOD_RES (4)..(4): phosphorylated serine
RRLSPVPVPM

SEQ ID NO: 2014 - protein, 10 aa, Artificial Sequence
  Description of Artificial Sequence: Synthetic peptide
  MOD_RES (4)..(4): phosphorylated serine
RRLSPVPVPR

SEQ ID NO: 2015 - protein, 9 aa, Artificial Sequence
  Description of Artificial Sequence: Synthetic peptide
  MOD_RES (4)..(4): phosphorylated serine
RRLSRELQK

SEQ ID NO: 2016 - protein, 9 aa, Artificial Sequence
  Description of Artificial Sequence: Synthetic peptide
  MOD_RES (4)..(4): phosphorylated serine
RRLSRELQF

SEQ ID NO: 2017 - protein, 9 aa, Artificial Sequence
  Description of Artificial Sequence: Synthetic peptide
  MOD_RES (4)..(4): phosphorylated serine
RRLSRELQL

SEQ ID NO: 2018 - protein, 9 aa, Artificial Sequence
  Description of Artificial Sequence: Synthetic peptide
  MOD_RES (4)..(4): phosphorylated serine
RRLSRELQM

SEQ ID NO: 2019 - protein, 9 aa, Artificial Sequence
  Description of Artificial Sequence: Synthetic peptide
  MOD_RES (4)..(4): phosphorylated serine
RRLSRELQR

SEQ ID NO: 2020 - protein, 9 aa, Artificial Sequence
  Description of Artificial Sequence: Synthetic peptide
  MOD_RES (4)..(4): phosphorylated serine
RRLSRKLSL

SEQ ID NO: 2021 - protein, 9 aa, Artificial Sequence
  Description of Artificial Sequence: Synthetic peptide
  MOD_RES (4)..(4): phosphorylated serine
RRLSVERIF

SEQ ID NO: 2022 - protein, 9 aa, Artificial Sequence
  Description of Artificial Sequence: Synthetic peptide
  MOD_RES (4)..(4): phosphorylated serine
RRLSVERIK

SEQ ID NO: 2023 - protein, 9 aa, Artificial Sequence
  Description of Artificial Sequence: Synthetic peptide
  MOD_RES (4)..(4): phosphorylated serine
RRLSVERIM

SEQ ID NO: 2024 - protein, 9 aa, Artificial Sequence
  Description of Artificial Sequence: Synthetic peptide
  MOD_RES (4)..(4): phosphorylated serine
RRLSVERIR

SEQ ID NO: 2025 - protein, 9 aa, Artificial Sequence
  Description of Artificial Sequence: Synthetic peptide
  MOD_RES (4)..(4): phosphorylated serine
RRLSYVLFI

SEQ ID NO: 2026 - protein, 8 aa, Artificial Sequence
  Description of Artificial Sequence: Synthetic peptide
  MOD_RES (7)..(7): phosphorylated serine
RRLTHLSF

SEQ ID NO: 2027 - protein, 8 aa, Artificial Sequence
  Description of Artificial Sequence: Synthetic peptide
  MOD_RES (7)..(7): phosphorylated serine
RRLTHLSK

SEQ ID NO: 2028 - protein, 8 aa, Artificial Sequence
  Description of Artificial Sequence: Synthetic peptide
  MOD_RES (7)..(7): phosphorylated serine
RRLTHLSL

SEQ ID NO: 2029 - protein, 8 aa, Artificial Sequence
  Description of Artificial Sequence: Synthetic peptide
  MOD_RES (7)..(7): phosphorylated serine
RRLTHLSM

SEQ ID NO: 2030 - protein, 8 aa, Artificial Sequence
  Description of Artificial Sequence: Synthetic peptide
  MOD_RES (7)..(7): phosphorylated serine
RRLTHLSR

SEQ ID NO: 2031 - protein, 8 aa, Artificial Sequence
  Description of Artificial Sequence: Synthetic peptide
  MOD_RES (4)..(4): phosphorylated serine
RRMSFQKP

SEQ ID NO: 2032 - protein, 9 aa, Artificial Sequence
  Description of Artificial Sequence: Synthetic peptide
  MOD_RES (4)..(4): phosphorylated serine
RRMSLLSVF

SEQ ID NO: 2033 - protein, 9 aa, Artificial Sequence
  Description of Artificial Sequence: Synthetic peptide
  MOD_RES (4)..(4): phosphorylated serine
RRMSLLSVK

SEQ ID NO: 2034 - protein, 9 aa, Artificial Sequence
  Description of Artificial Sequence: Synthetic peptide
  MOD_RES (4)..(4): phosphorylated serine
RRMSLLSVL

SEQ ID NO: 2035 - protein, 9 aa, Artificial Sequence
  Description of Artificial Sequence: Synthetic peptide
  MOD_RES (4)..(4): phosphorylated serine
RRMSLLSVM

SEQ ID NO: 2036 - protein, 9 aa, Artificial Sequence
  Description of Artificial Sequence: Synthetic peptide
  MOD_RES (4)..(4): phosphorylated serine
RRMSLLSVR

SEQ ID NO: 2037 - protein, 9 aa, Artificial Sequence
  Description of Artificial Sequence: Synthetic peptide
  MOD_RES (3)..(3): oxidized methionine
  MOD_RES (4)..(4): phosphorylated serine
RRMSLLSVV

SEQ ID NO: 2038 - protein, 9 aa, Artificial Sequence
  Description of Artificial Sequence: Synthetic peptide
  MOD_RES (4)..(4): phosphorylated serine
RRMSLLSVV

SEQ ID NO: 2039 - protein, 9 aa, Artificial Sequence
  Description of Artificial Sequence: Synthetic peptide
  MOD_RES (4)..(4): phosphorylated serine
RRMSLLSVY

SEQ ID NO: 2040 - protein, 8 aa, Artificial Sequence
  Description of Artificial Sequence: Synthetic peptide
  MOD_RES (4)..(4): phosphorylated serine
RRMSLLSW

SEQ ID NO: 2041 - protein, 8 aa, Artificial Sequence
  Description of Artificial Sequence: Synthetic peptide
  MOD_RES (4)..(4): phosphorylated serine
RRMSLSVM

SEQ ID NO: 2042 - protein, 9 aa, Artificial Sequence
  Description of Artificial Sequence: Synthetic peptide
  MOD_RES (4)..(4): phosphorylated serine
RRMSPIKPL

SEQ ID NO: 2043 - protein, 9 aa, Artificial Sequence
  Description of Artificial Sequence: Synthetic peptide
  MOD_RES (4)..(4): phosphorylated serine
RRMSPKAQR

SEQ ID NO: 2044 - protein, 9 aa, Artificial Sequence
  Description of Artificial Sequence: Synthetic peptide
  MOD_RES (4)..(4): phosphorylated serine
RRMSPKAQF

SEQ ID NO: 2045 - protein, 9 aa, Artificial Sequence
  Description of Artificial Sequence: Synthetic peptide
  MOD_RES (4)..(4): phosphorylated serine
RRMSPKAQK

SEQ ID NO: 2046 - protein, 9 aa, Artificial Sequence
  Description of Artificial Sequence: Synthetic peptide
  MOD_RES (4)..(4): phosphorylated serine
RRMSPKAQL

SEQ ID NO: 2047 - protein, 9 aa, Artificial Sequence
  Description of Artificial Sequence: Synthetic peptide
  MOD_RES (4)..(4): phosphorylated serine
RRMSPKAQM

SEQ ID NO: 2048 - protein, 8 aa, Artificial Sequence
  Description of Artificial Sequence: Synthetic peptide
  MOD_RES (4)..(4): phosphorylated serine
RRMSPKPF

SEQ ID NO: 2049 - protein, 8 aa, Artificial Sequence
  Description of Artificial Sequence: Synthetic peptide
  MOD_RES (4)..(4): phosphorylated serine
RRMSPKPK

SEQ ID NO: 2050 - protein, 8 aa, Artificial Sequence
  Description of Artificial Sequence: Synthetic peptide
  MOD_RES (4)..(4): phosphorylated serine
RRMSPKPM

SEQ ID NO: 2051 - protein, 8 aa, Artificial Sequence
  Description of Artificial Sequence: Synthetic peptide
  MOD_RES (4)..(4): phosphorylated serine
RRMSPKPR

SEQ ID NO: 2052 - protein, 9 aa, Artificial Sequence
  Description of Artificial Sequence: Synthetic peptide
  MOD_RES (4)..(4): phosphorylated serine
RRNSAPVSV

SEQ ID NO: 2053 - protein, 9 aa, Artificial Sequence
  Description of Artificial Sequence: Synthetic peptide
  MOD_RES (4)..(4): phosphorylated serine
RRNSINRNF

SEQ ID NO: 2054 - protein, 11 aa, Artificial Sequence
  Description of Artificial Sequence: Synthetic peptide
  MOD_RES (4)..(4): phosphorylated serine
RRNSNPVIAEF

SEQ ID NO: 2055 - protein, 11 aa, Artificial Sequence
  Description of Artificial Sequence: Synthetic peptide
  MOD_RES (4)..(4): phosphorylated serine
RRNSNPVIAEK

SEQ ID NO: 2056 - protein, 11 aa, Artificial Sequence
  Description of Artificial Sequence: Synthetic peptide
  MOD_RES (4)..(4): phosphorylated serine
RRNSNPVIAEL

SEQ ID NO: 2057 - protein, 11 aa, Artificial Sequence
  Description of Artificial Sequence: Synthetic peptide
  MOD_RES (4)..(4): phosphorylated serine
RRNSNPVIAEM

SEQ ID NO: 2058 - protein, 11 aa, Artificial Sequence
  Description of Artificial Sequence: Synthetic peptide
  MOD_RES (4)..(4): phosphorylated serine
RRNSNPVIAER

SEQ ID NO: 2059 - protein, 9 aa, Artificial Sequence
  Description of Artificial Sequence: Synthetic peptide
  MOD_RES (4)..(4): phosphorylated serine
RRNSSERTF

SEQ ID NO: 2060 - protein, 9 aa, Artificial Sequence
  Description of Artificial Sequence: Synthetic peptide
  MOD_RES (4)..(4): phosphorylated serine
RRNSSERTK

SEQ ID NO: 2061 - protein, 9 aa, Artificial Sequence
  Description of Artificial Sequence: Synthetic peptide
  MOD_RES (4)..(4): phosphorylated serine
RRNSSERTL

SEQ ID NO: 2062 - protein, 9 aa, Artificial Sequence
  Description of Artificial Sequence: Synthetic peptide
  MOD_RES (4)..(4): phosphorylated serine
RRNSSERTM

SEQ ID NO: 2063 - protein, 9 aa, Artificial Sequence
  Description of Artificial Sequence: Synthetic peptide
  MOD_RES (4)..(4): phosphorylated serine
RRNSSERTR

SEQ ID NO: 2064 - protein, 9 aa, Artificial Sequence
  Description of Artificial Sequence: Synthetic peptide
  MOD_RES (4)..(4): phosphorylated serine
RRNSSERTY

SEQ ID NO: 2065 - protein, 9 aa, Artificial Sequence
  Description of Artificial Sequence: Synthetic peptide
  MOD_RES (4)..(4): phosphorylated serine
RRNSSIVGF

SEQ ID NO: 2066 - protein, 9 aa, Artificial Sequence
  Description of Artificial Sequence: Synthetic peptide
  MOD_RES (4)..(4): phosphorylated serine
RRNSSIVGK

SEQ ID NO: 2067 - protein, 9 aa, Artificial Sequence
  Description of Artificial Sequence: Synthetic peptide
  MOD_RES (4)..(4): phosphorylated serine
RRNSSIVGL

SEQ ID NO: 2068 - protein, 9 aa, Artificial Sequence
  Description of Artificial Sequence: Synthetic peptide
  MOD_RES (4)..(4): phosphorylated serine
RRNSSIVGM

SEQ ID NO: 2069 - protein, 9 aa, Artificial Sequence
  Description of Artificial Sequence: Synthetic peptide
  MOD_RES (4)..(4): phosphorylated serine
RRNSSIVGR

SEQ ID NO: 2070 - protein, 9 aa, Artificial Sequence
  Description of Artificial Sequence: Synthetic peptide
  MOD_RES (4)..(4): phosphorylated serine
RRNSSIVGY

SEQ ID NO: 2071 - protein, 10 aa, Artificial Sequence
  Description of Artificial Sequence: Synthetic peptide
  MOD_RES (4)..(4): phosphorylated serine
RRNSVFQQGF

SEQ ID NO: 2072 - protein, 10 aa, Artificial Sequence
  Description of Artificial Sequence: Synthetic peptide
  MOD_RES (4)..(4): phosphorylated serine
RRNSVFQQGK

SEQ ID NO: 2073 - protein, 10 aa, Artificial Sequence
  Description of Artificial Sequence: Synthetic peptide
  MOD_RES (4)..(4): phosphorylated serine
RRNSVFQQGL

SEQ ID NO: 2074 - protein, 10 aa, Artificial Sequence
  Description of Artificial Sequence: Synthetic peptide
  MOD_RES (4)..(4): phosphorylated serine
RRNSVFQQGM

SEQ ID NO: 2075 - protein, 10 aa, Artificial Sequence
  Description of Artificial Sequence: Synthetic peptide
  MOD_RES (4)..(4): phosphorylated serine
RRNSVFQQGR

SEQ ID NO: 2076 - protein, 10 aa, Artificial Sequence
  Description of Artificial Sequence: Synthetic peptide
  MOD_RES (4)..(4): phosphorylated serine
RRNSVFQQGY

SEQ ID NO: 2077 - protein, 9 aa, Artificial Sequence
  Description of Artificial Sequence: Synthetic peptide
  MOD_RES (4)..(4): phosphorylated serine
RRPSIAPVL

SEQ ID NO: 2078 - protein, 9 aa, Artificial Sequence
  Description of Artificial Sequence: Synthetic peptide
  MOD_RES (4)..(4): phosphorylated serine
RRPSLLSEF

SEQ ID NO: 2079 - protein, 9 aa, Artificial Sequence
  Description of Artificial Sequence: Synthetic peptide
  MOD_RES (4)..(4): phosphorylated serine
RRPSLVHGF

SEQ ID NO: 2080 - protein, 9 aa, Artificial Sequence
  Description of Artificial Sequence: Synthetic peptide
  MOD_RES (4)..(4): phosphorylated serine
RRPSLVHGK

SEQ ID NO: 2081 - protein, 9 aa, Artificial Sequence
  Description of Artificial Sequence: Synthetic peptide
  MOD_RES (4)..(4): phosphorylated serine
RRPSLVHGL

SEQ ID NO: 2082 - protein, 9 aa, Artificial Sequence
  Description of Artificial Sequence: Synthetic peptide
  MOD_RES (4)..(4): phosphorylated serine
RRPSLVHGM

SEQ ID NO: 2083 - protein, 9 aa, Artificial Sequence
  Description of Artificial Sequence: Synthetic peptide
  MOD_RES (4)..(4): phosphorylated serine
RRPSLVHGR

SEQ ID NO: 2084 - protein, 9 aa, Artificial Sequence
  Description of Artificial Sequence: Synthetic peptide
  MOD_RES (4)..(4): phosphorylated serine
RRPSLVHGY

SEQ ID NO: 2085 - protein, 9 aa, Artificial Sequence
  Description of Artificial Sequence: Synthetic peptide
  MOD_RES (4)..(4): phosphorylated serine
RRPSVFERF

SEQ ID NO: 2086 - protein, 9 aa, Artificial Sequence
  Description of Artificial Sequence: Synthetic peptide
  MOD_RES (4)..(4): phosphorylated serine
RRPSVFERK

SEQ ID NO: 2087 - protein, 9 aa, Artificial Sequence
  Description of Artificial Sequence: Synthetic peptide
  MOD_RES (4)..(4): phosphorylated serine
RRPSVFERL

SEQ ID NO: 2088 - protein, 9 aa, Artificial Sequence
  Description of Artificial Sequence: Synthetic peptide
  MOD_RES (4)..(4): phosphorylated serine
RRPSVFERM

SEQ ID NO: 2089 - protein, 9 aa, Artificial Sequence
  Description of Artificial Sequence: Synthetic peptide
  MOD_RES (4)..(4): phosphorylated serine
RRPSVFERR

SEQ ID NO: 2090 - protein, 9 aa, Artificial Sequence
  Description of Artificial Sequence: Synthetic peptide
  MOD_RES (4)..(4): phosphorylated serine
RRPSVFERY

SEQ ID NO: 2091 - protein, 9 aa, Artificial Sequence
  Description of Artificial Sequence: Synthetic peptide
  MOD_RES (4)..(4): phosphorylated serine
RRPSYRKIF

SEQ ID NO: 2092 - protein, 9 aa, Artificial Sequence
  Description of Artificial Sequence: Synthetic peptide
  MOD_RES (4)..(4): phosphorylated serine
RRPSYRKIK

SEQ ID NO: 2093 - protein, 9 aa, Artificial Sequence
  Description of Artificial Sequence: Synthetic peptide
  MOD_RES (4)..(4): phosphorylated serine
RRPSYRKIL

SEQ ID NO: 2094 - protein, 9 aa, Artificial Sequence
  Description of Artificial Sequence: Synthetic peptide
  MOD_RES (4)..(4): phosphorylated serine
RRPSYRKIM

SEQ ID NO: 2095 - protein, 9 aa, Artificial Sequence
  Description of Artificial Sequence: Synthetic peptide
  MOD_RES (4)..(4): phosphorylated serine
RRPSYRKIR

SEQ ID NO: 2096 - protein, 9 aa, Artificial Sequence
  Description of Artificial Sequence: Synthetic peptide
  MOD_RES (4)..(4): phosphorylated serine
RRPSYRKIY

SEQ ID NO: 2097 - protein, 9 aa, Artificial Sequence
  Description of Artificial Sequence: Synthetic peptide
  MOD_RES (4)..(4): phosphorylated serine
RRPSYTLGF

SEQ ID NO: 2098 - protein, 9 aa, Artificial Sequence
  Description of Artificial Sequence: Synthetic peptide
  MOD_RES (4)..(4): phosphorylated serine
RRPSYTLGK

SEQ ID NO: 2099 - protein, 9 aa, Artificial Sequence
  Description of Artificial Sequence: Synthetic peptide
  MOD_RES (4)..(4): phosphorylated serine
RRPSYTLGL

SEQ ID NO: 2100 - protein, 9 aa, Artificial Sequence
  Description of Artificial Sequence: Synthetic peptide
  MOD_RES (4)..(4): phosphorylated serine
RRPSYTLGM

SEQ ID NO: 2101 - protein, 9 aa, Artificial Sequence
  Description of Artificial Sequence: Synthetic peptide
  MOD_RES (4)..(4): phosphorylated serine
RRPSYTLGR

SEQ ID NO: 2102 - protein, 9 aa, Artificial Sequence
  Description of Artificial Sequence: Synthetic peptide
  MOD_RES (4)..(4): phosphorylated serine
RRPSYTLGV

SEQ ID NO: 2103 - protein, 9 aa, Artificial Sequence
  Description of Artificial Sequence: Synthetic peptide
  MOD_RES (4)..(4): phosphorylated serine
RRPSYTLGY

SEQ ID NO: 2104 - protein, 9 aa, Artificial Sequence
  Description of Artificial Sequence: Synthetic peptide
  MOD_RES (4)..(4): phosphorylated serine
RRQSKVEAL

SEQ ID NO: 2105 - protein, 9 aa, Artificial Sequence
  Description of Artificial Sequence: Synthetic peptide
  MOD_RES (4)..(4): phosphorylated serine
RRRSLERLL

SEQ ID NO: 2106 - protein, 8 aa, Artificial Sequence
  Description of Artificial Sequence: Synthetic peptide
  MOD_RES (3)..(3): phosphorylated serine
RRSFLVSY

SEQ ID NO: 2107 - protein, 7 aa, Artificial Sequence
  Description of Artificial Sequence: Synthetic peptide
  MOD_RES (5)..(5): phosphorylated serine
RRSFSLE

SEQ ID NO: 2108 - protein, 7 aa, Artificial Sequence
  Description of Artificial Sequence: Synthetic peptide
  MOD_RES (4)..(4): phosphorylated serine
RRSSFLQ

SEQ ID NO: 2109 - protein, 9 aa, Artificial Sequence
  Description of Artificial Sequence: Synthetic peptide
  MOD_RES (3)..(3): phosphorylated serine
  MOD_RES (4)..(4): phosphorylated serine
RRSSFLQLF

SEQ ID NO: 2110 - protein, 9 aa, Artificial Sequence
  Description of Artificial Sequence: Synthetic peptide
  MOD_RES (3)..(3): phosphorylated serine
  MOD_RES (4)..(4): phosphorylated serine
RRSSFLQVF

SEQ ID NO: 2111 - protein, 9 aa, Artificial Sequence
  Description of Artificial Sequence: Synthetic peptide
  MOD_RES (4)..(4): phosphorylated serine
RRSSFLQVF

SEQ ID NO: 2112 - protein, 9 aa, Artificial Sequence
  Description of Artificial Sequence: Synthetic peptide
  MOD_RES (4)..(4): phosphorylated serine
RRSSFLQVK

SEQ ID NO: 2113 - protein, 9 aa, Artificial Sequence
  Description of Artificial Sequence: Synthetic peptide
  MOD_RES (4)..(4): phosphorylated serine
RRSSFLQVL

SEQ ID NO: 2114 - protein, 9 aa, Artificial Sequence
  Description of Artificial Sequence: Synthetic peptide
  MOD_RES (3)..(3): phosphorylated serine
  MOD_RES (4)..(4): phosphorylated serine
RRSSFLQVM

SEQ ID NO: 2115 - protein, 9 aa, Artificial Sequence
  Description of Artificial Sequence: Synthetic peptide
  MOD_RES (4)..(4): phosphorylated serine
RRSSFLQVM

SEQ ID NO: 2116 - protein, 9 aa, Artificial Sequence
  Description of Artificial Sequence: Synthetic peptide
  MOD_RES (4)..(4): phosphorylated serine
RRSSFLQVR

SEQ ID NO: 2117 - protein, 9 aa, Artificial Sequence
  Description of Artificial Sequence: Synthetic peptide
  MOD_RES (3)..(3): phosphorylated serine
  MOD_RES (4)..(4): phosphorylated serine
RRSSFLQVV

SEQ ID NO: 2118 - protein, 9 aa, Artificial Sequence
  Description of Artificial Sequence: Synthetic peptide
  MOD_RES (4)..(4): phosphorylated serine
RRSSFLQVY

SEQ ID NO: 2119 - protein, 9 aa, Artificial Sequence
  Description of Artificial Sequence: Synthetic peptide
  MOD_RES (4)..(4): phosphorylated serine
RRSSIGLRF

SEQ ID NO: 2120 - protein, 9 aa, Artificial Sequence
  Description of Artificial Sequence: Synthetic peptide
  MOD_RES (4)..(4): phosphorylated serine
RRSSIGLRK

SEQ ID NO: 2121 - protein, 9 aa, Artificial Sequence
  Description of Artificial Sequence: Synthetic peptide
  MOD_RES (4)..(4): phosphorylated serine
RRSSIGLRL

SEQ ID NO: 2122 - protein, 9 aa, Artificial Sequence
  Description of Artificial Sequence: Synthetic peptide
  MOD_RES (4)..(4): phosphorylated serine
RRSSIGLRM

SEQ ID NO: 2123 - protein, 9 aa, Artificial Sequence
  Description of Artificial Sequence: Synthetic peptide
  MOD_RES (4)..(4): phosphorylated serine
RRSSIGLRR

SEQ ID NO: 2124 - protein, 9 aa, Artificial Sequence
  Description of Artificial Sequence: Synthetic peptide
  MOD_RES (4)..(4): phosphorylated serine
RRSSIGLRV

SEQ ID NO: 2125 - protein, 9 aa, Artificial Sequence
  Description of Artificial Sequence: Synthetic peptide
  MOD_RES (4)..(4): phosphorylated serine
RRSSIGLRY

SEQ ID NO: 2126 - protein, 9 aa, Artificial Sequence
  Description of Artificial Sequence: Synthetic peptide
  MOD_RES (3)..(3): phosphorylated serine
RRSSIQSTF

SEQ ID NO: 2127 - protein, 9 aa, Artificial Sequence
  Description of Artificial Sequence: Synthetic peptide
  MOD_RES (4)..(4): phosphorylated serine
RRSSIQSTF

SEQ ID NO: 2128 - protein, 9 aa, Artificial Sequence
  Description of Artificial Sequence: Synthetic peptide
  MOD_RES (4)..(4): phosphorylated serine
RRSSIQSTK

SEQ ID NO: 2129 - protein, 9 aa, Artificial Sequence
  Description of Artificial Sequence: Synthetic peptide
  MOD_RES (4)..(4): phosphorylated serine
RRSSIQSTL

SEQ ID NO: 2130 - protein, 9 aa, Artificial Sequence
  Description of Artificial Sequence: Synthetic peptide
  MOD_RES (4)..(4): phosphorylated serine
RRSSIQSTM

SEQ ID NO: 2131 - protein, 9 aa, Artificial Sequence
  Description of Artificial Sequence: Synthetic peptide
  MOD_RES (4)..(4): phosphorylated serine
RRSSIQSTR

SEQ ID NO: 2132 - protein, 9 aa, Artificial Sequence
  Description of Artificial Sequence: Synthetic peptide
  MOD_RES (4)..(4): phosphorylated serine
RRSSIQSTY

SEQ ID NO: 2133 - protein, 12 aa, Artificial Sequence
  Description of Artificial Sequence: Synthetic peptide
  MOD_RES (4)..(4): phosphorylated serine
RRSSLDAEIDSF

SEQ ID NO: 2134 - protein, 12 aa, Artificial Sequence
  Description of Artificial Sequence: Synthetic peptide
  MOD_RES (4)..(4): phosphorylated serine
RRSSLDAEIDSL

SEQ ID NO: 2135 - protein, 12 aa, Artificial Sequence
  Description of Artificial Sequence: Synthetic peptide
  MOD_RES (4)..(4): phosphorylated serine
RRSSLDAEIDSM

SEQ ID NO: 2136 - protein, 12 aa, Artificial Sequence
  Description of Artificial Sequence: Synthetic peptide
  MOD_RES (4)..(4): phosphorylated serine
RRSSLDAEIDSV

SEQ ID NO: 2137 - protein, 9 aa, Artificial Sequence
  Description of Artificial Sequence: Synthetic peptide
  MOD_RES (3)..(3): phosphorylated serine
RRSSQSWSF

SEQ ID NO: 2138 - protein, 9 aa, Artificial Sequence
  Description of Artificial Sequence: Synthetic peptide
  MOD_RES (4)..(4): phosphorylated serine
RRSSQSWSF

SEQ ID NO: 2139 - protein, 9 aa, Artificial Sequence
  Description of Artificial Sequence: Synthetic peptide
  MOD_RES (4)..(4): phosphorylated serine
RRSSQSWSK

SEQ ID NO: 2140 - protein, 9 aa, Artificial Sequence
  Description of Artificial Sequence: Synthetic peptide
  MOD_RES (3)..(3): phosphorylated serine
RRSSQSWSL

SEQ ID NO: 2141 - protein, 9 aa, Artificial Sequence
  Description of Artificial Sequence: Synthetic peptide
  MOD_RES (4)..(4): phosphorylated serine
RRSSQSWSL

SEQ ID NO: 2142 - protein, 9 aa, Artificial Sequence
  Description of Artificial Sequence: Synthetic peptide
  MOD_RES (3)..(3): phosphorylated serine
RRSSQSWSM

SEQ ID NO: 2143 - protein, 9 aa, Artificial Sequence
  Description of Artificial Sequence: Synthetic peptide
  MOD_RES (4)..(4): phosphorylated serine
RRSSQSWSM

SEQ ID NO: 2144 - protein, 9 aa, Artificial Sequence
  Description of Artificial Sequence: Synthetic peptide
  MOD_RES (4)..(4): phosphorylated serine
RRSSQSWSR

SEQ ID NO: 2145 - protein, 9 aa, Artificial Sequence
  Description of Artificial Sequence: Synthetic peptide
  MOD_RES (3)..(3): phosphorylated serine
RRSSQSWSV

SEQ ID NO: 2146 - protein, 9 aa, Artificial Sequence
  Description of Artificial Sequence: Synthetic peptide
  MOD_RES (4)..(4): phosphorylated serine
RRSSQSWSY

SEQ ID NO: 2147 - protein, 9 aa, Artificial Sequence
  Description of Artificial Sequence: Synthetic peptide
  MOD_RES (4)..(4): phosphorylated serine
RRSSSVAQV

SEQ ID NO: 2148 - protein, 11 aa, Artificial Sequence
  Description of Artificial Sequence: Synthetic peptide
  MOD_RES (4)..(4): phosphorylated serine
RRSSTASLVKF

SEQ ID NO: 2149 - protein, 11 aa, Artificial Sequence
  Description of Artificial Sequence: Synthetic peptide
  MOD_RES (4)..(4): phosphorylated serine
RRSSTASLVKK

SEQ ID NO: 2150 - protein, 11 aa, Artificial Sequence
  Description of Artificial Sequence: Synthetic peptide
  MOD_RES (4)..(4): phosphorylated serine
RRSSTASLVKL

SEQ ID NO: 2151 - protein, 11 aa, Artificial Sequence
  Description of Artificial Sequence: Synthetic peptide
  MOD_RES (4)..(4): phosphorylated serine
RRSSTASLVKM

SEQ ID NO: 2152 - protein, 11 aa, Artificial Sequence
  Description of Artificial Sequence: Synthetic peptide
  MOD_RES (4)..(4): phosphorylated serine
RRSSTASLVKR

SEQ ID NO: 2153 - protein, 9 aa, Artificial Sequence
  Description of Artificial Sequence: Synthetic peptide
  MOD_RES (3)..(3): phosphorylated serine
RRSSVDLGF

SEQ ID NO: 2154 - protein, 9 aa, Artificial Sequence
  Description of Artificial Sequence: Synthetic peptide
  MOD_RES (4)..(4): phosphorylated serine
RRSSVDLGF

SEQ ID NO: 2155 - protein, 9 aa, Artificial Sequence
  Description of Artificial Sequence: Synthetic peptide
  MOD_RES (3)..(3): phosphorylated serine
RRSSVDLGK

SEQ ID NO: 2156 - protein, 9 aa, Artificial Sequence
  Description of Artificial Sequence: Synthetic peptide
  MOD_RES (4)..(4): phosphorylated serine
RRSSVDLGK

SEQ ID NO: 2157 - protein, 9 aa, Artificial Sequence
  Description of Artificial Sequence: Synthetic peptide
  MOD_RES (3)..(3): phosphorylated serine
RRSSVDLGL

SEQ ID NO: 2158 - protein, 9 aa, Artificial Sequence
  Description of Artificial Sequence: Synthetic peptide
  MOD_RES (4)..(4): phosphorylated serine
RRSSVDLGL

SEQ ID NO: 2159 - protein, 9 aa, Artificial Sequence
  Description of Artificial Sequence: Synthetic peptide
  MOD_RES (3)..(3): phosphorylated serine
RRSSVDLGM

SEQ ID NO: 2160 - protein, 9 aa, Artificial Sequence
  Description of Artificial Sequence: Synthetic peptide
  MOD_RES (4)..(4): phosphorylated serine
RRSSVDLGM

SEQ ID NO: 2161 - protein, 9 aa, Artificial Sequence
  Description of Artificial Sequence: Synthetic peptide
  MOD_RES (3)..(3): phosphorylated serine
RRSSVDLGR

SEQ ID NO: 2162 - protein, 9 aa, Artificial Sequence
  Description of Artificial Sequence: Synthetic peptide
  MOD_RES (4)..(4): phosphorylated serine
RRSSVDLGR

SEQ ID NO: 2163 - protein, 9 aa, Artificial Sequence
  Description of Artificial Sequence: Synthetic peptide
  MOD_RES (3)..(3): phosphorylated serine
RRSSVDLGY

SEQ ID NO: 2164 - protein, 9 aa, Artificial Sequence
  Description of Artificial Sequence: Synthetic peptide
  MOD_RES (4)..(4): phosphorylated serine
RRSSVDLGY

SEQ ID NO: 2165 - protein, 9 aa, Artificial Sequence
  Description of Artificial Sequence: Synthetic peptide
  MOD_RES (4)..(4): phosphorylated serine
RRSSVKVEA

SEQ ID NO: 2166 - protein, 9 aa, Artificial Sequence
  Description of Artificial Sequence: Synthetic peptide
  MOD_RES (4)..(4): phosphorylated serine
RRSSVKVEF

SEQ ID NO: 2167 - protein, 9 aa, Artificial Sequence
  Description of Artificial Sequence: Synthetic peptide
  MOD_RES (4)..(4): phosphorylated serine
RRSSVKVEK

SEQ ID NO: 2168 - protein, 9 aa, Artificial Sequence
  Description of Artificial Sequence: Synthetic peptide
  MOD_RES (4)..(4): phosphorylated serine
RRSSVKVEL

SEQ ID NO: 2169 - protein, 9 aa, Artificial Sequence
  Description of Artificial Sequence: Synthetic peptide
  MOD_RES (4)..(4): phosphorylated serine
RRSSVKVEM

SEQ ID NO: 2170 - protein, 9 aa, Artificial Sequence
  Description of Artificial Sequence: Synthetic peptide
  MOD_RES (4)..(4): phosphorylated serine
RRSSVKVER

SEQ ID NO: 2171 - protein, 9 aa, Artificial Sequence
  Description of Artificial Sequence: Synthetic peptide
  MOD_RES (4)..(4): phosphorylated serine
RRSSVKVEY

SEQ ID NO: 2172 - protein, 9 aa, Artificial Sequence
  Description of Artificial Sequence: Synthetic peptide
  MOD_RES (4)..(4): phosphorylated serine
RRTSPITRF

SEQ ID NO: 2173 - protein, 9 aa, Artificial Sequence
  Description of Artificial Sequence: Synthetic peptide
  MOD_RES (4)..(4): phosphorylated serine
RRTSPITRK

SEQ ID NO: 2174 - protein, 9 aa, Artificial Sequence
  Description of Artificial Sequence: Synthetic peptide
  MOD_RES (4)..(4): phosphorylated serine
RRTSPITRL

SEQ ID NO: 2175 - protein, 9 aa, Artificial Sequence
  Description of Artificial Sequence: Synthetic peptide
  MOD_RES (4)..(4): phosphorylated serine
RRTSPITRM

SEQ ID NO: 2176 - protein, 9 aa, Artificial Sequence
  Description of Artificial Sequence: Synthetic peptide
  MOD_RES (4)..(4): phosphorylated serine
RRTSPITRR

SEQ ID NO: 2177 - protein, 9 aa, Artificial Sequence
  Description of Artificial Sequence: Synthetic peptide
  MOD_RES (8)..(8): phosphorylated serine
RRVVQRSSF

SEQ ID NO: 2178 - protein, 9 aa, Artificial Sequence
  Description of Artificial Sequence: Synthetic peptide
  MOD_RES (8)..(8): phosphorylated serine
RRVVQRSSK

SEQ ID NO: 2179 - protein, 9 aa, Artificial Sequence
  Description of Artificial Sequence: Synthetic peptide
  MOD_RES (8)..(8): phosphorylated serine
RRVVQRSSL

SEQ ID NO: 2180 - protein, 9 aa, Artificial Sequence
  Description of Artificial Sequence: Synthetic peptide
  MOD_RES (8)..(8): phosphorylated serine
RRVVQRSSM

SEQ ID NO: 2181 - protein, 9 aa, Artificial Sequence
  Description of Artificial Sequence: Synthetic peptide
  MOD_RES (8)..(8): phosphorylated serine
RRVVQRSSR

SEQ ID NO: 2182 - protein, 9 aa, Artificial Sequence
  Description of Artificial Sequence: Synthetic peptide
  MOD_RES (8)..(8): phosphorylated serine
RRVVQRSSY

SEQ ID NO: 2183 - protein, 8 aa, Artificial Sequence
  Description of Artificial Sequence: Synthetic peptide
  MOD_RES (7)..(7): phosphorylated serine
RRWQRSSL

SEQ ID NO: 2184 - protein, 9 aa, Artificial Sequence
  Description of Artificial Sequence: Synthetic peptide
  MOD_RES (4)..(4): phosphorylated serine
RRYSGKTEF

SEQ ID NO: 2185 - protein, 9 aa, Artificial Sequence
  Description of Artificial Sequence: Synthetic peptide
  MOD_RES (4)..(4): phosphorylated serine
RRYSGKTEK

SEQ ID NO: 2186 - protein, 9 aa, Artificial Sequence
  Description of Artificial Sequence: Synthetic peptide
  MOD_RES (4)..(4): phosphorylated serine
RRYSGKTEL

SEQ ID NO: 2187 - protein, 9 aa, Artificial Sequence
  Description of Artificial Sequence: Synthetic peptide
  MOD_RES (4)..(4): phosphorylated serine
RRYSGKTER

SEQ ID NO: 2188 - protein, 9 aa, Artificial Sequence
  Description of Artificial Sequence: Synthetic peptide
  MOD_RES (4)..(4): phosphorylated serine
RRYSGKTEY

SEQ ID NO: 2189 - protein, 9 aa, Artificial Sequence
  Description of Artificial Sequence: Synthetic peptide
  MOD_RES (4)..(4): phosphorylated serine
RRYSGNMEF

SEQ ID NO: 2190 - protein, 9 aa, Artificial Sequence
  Description of Artificial Sequence: Synthetic peptide
  MOD_RES (4)..(4): phosphorylated serine
RRYSGNMEK

SEQ ID NO: 2191 - protein, 9 aa, Artificial Sequence
  Description of Artificial Sequence: Synthetic peptide
  MOD_RES (4)..(4): phosphorylated serine
RRYSGNMEL

SEQ ID NO: 2192 - protein, 9 aa, Artificial Sequence
  Description of Artificial Sequence: Synthetic peptide
  MOD_RES (4)..(4): phosphorylated serine
RRYSGNMEM

SEQ ID NO: 2193 - protein, 9 aa, Artificial Sequence
  Description of Artificial Sequence: Synthetic peptide
  MOD_RES (4)..(4): phosphorylated serine
RRYSGNMER

SEQ ID NO: 2194 - protein, 9 aa, Artificial Sequence
  Description of Artificial Sequence: Synthetic peptide
  MOD_RES (4)..(4): phosphorylated serine
RRYSKFFDL

SEQ ID NO: 2195 - protein, 9 aa, Artificial Sequence
  Description of Artificial Sequence: Synthetic peptide
  MOD_RES (4)..(4): phosphorylated serine
RRYSPPIER

SEQ ID NO: 2196 - protein, 8 aa, Artificial Sequence
  Description of Artificial Sequence: Synthetic peptide
  MOD_RES (4)..(4): phosphorylated serine
RRYSPPIQ

SEQ ID NO: 2197 - protein, 9 aa, Artificial Sequence
  Description of Artificial Sequence: Synthetic peptide
  MOD_RES (4)..(4): phosphorylated serine
RRYSPPIQF

SEQ ID NO: 2198 - protein, 9 aa, Artificial Sequence
  Description of Artificial Sequence: Synthetic peptide
  MOD_RES (4)..(4): phosphorylated serine
RRYSPPIQK

SEQ ID NO: 2199 - protein, 9 aa, Artificial Sequence
  Description of Artificial Sequence: Synthetic peptide
  MOD_RES (4)..(4): phosphorylated serine
RRYSPPIQL

SEQ ID NO: 2200 - protein, 9 aa, Artificial Sequence
  Description of Artificial Sequence: Synthetic peptide
  MOD_RES (4)..(4): phosphorylated serine
RRYSPPIQM

SEQ ID NO: 2201 - protein, 9 aa, Artificial Sequence
  Description of Artificial Sequence: Synthetic peptide
  MOD_RES (4)..(4): phosphorylated serine
RRYSPPIQR

SEQ ID NO: 2202 - protein, 9 aa, Artificial Sequence
  Description of Artificial Sequence: Synthetic peptide
  MOD_RES (4)..(4): phosphorylated serine
RRYSPPIQY

SEQ ID NO: 2203 - protein, 10 aa, Artificial Sequence
  Description of Artificial Sequence: Synthetic peptide
  MOD_RES (4)..(4): phosphorylated serine
  MOD_RES (6)..(6): phosphorylated serine
RRYSRSPYSF

SEQ ID NO: 2204 - protein, 10 aa, Artificial Sequence
  Description of Artificial Sequence: Synthetic peptide
  MOD_RES (4)..(4): phosphorylated serine
RRYSRSPYSF

SEQ ID NO: 2205 - protein, 10 aa, Artificial Sequence
  Description of Artificial Sequence: Synthetic peptide
  MOD_RES (6)..(6): phosphorylated serine
RRYSRSPYSF

SEQ ID NO: 2206 - protein, 10 aa, Artificial Sequence
  Description of Artificial Sequence: Synthetic peptide
  MOD_RES (4)..(4): phosphorylated serine
  MOD_RES (6)..(6): phosphorylated serine
RRYSRSPYSK

SEQ ID NO: 2207 - protein, 10 aa, Artificial Sequence
  Description of Artificial Sequence: Synthetic peptide
  MOD_RES (4)..(4): phosphorylated serine
RRYSRSPYSK

SEQ ID NO: 2208 - protein, 10 aa, Artificial Sequence
  Description of Artificial Sequence: Synthetic peptide
  MOD_RES (6)..(6): phosphorylated serine
RRYSRSPYSK

SEQ ID NO: 2209 - protein, 10 aa, Artificial Sequence
  Description of Artificial Sequence: Synthetic peptide
  MOD_RES (4)..(4): phosphorylated serine
  MOD_RES (6)..(6): phosphorylated serine
RRYSRSPYSL

SEQ ID NO: 2210 - protein, 10 aa, Artificial Sequence
  Description of Artificial Sequence: Synthetic peptide
  MOD_RES (4)..(4): phosphorylated serine
RRYSRSPYSL

SEQ ID NO: 2211 - protein, 10 aa, Artificial Sequence
  Description of Artificial Sequence: Synthetic peptide
  MOD_RES (6)..(6): phosphorylated serine
RRYSRSPYSL

SEQ ID NO: 2212 - protein, 10 aa, Artificial Sequence
  Description of Artificial Sequence: Synthetic peptide
  MOD_RES (4)..(4): phosphorylated serine
  MOD_RES (6)..(6): phosphorylated serine
RRYSRSPYSM

SEQ ID NO: 2213 - protein, 10 aa, Artificial Sequence
  Description of Artificial Sequence: Synthetic peptide
  MOD_RES (4)..(4): phosphorylated serine
RRYSRSPYSM

SEQ ID NO: 2214 - protein, 10 aa, Artificial Sequence
  Description of Artificial Sequence: Synthetic peptide
  MOD_RES (6)..(6): phosphorylated serine
RRYSRSPYSM

SEQ ID NO: 2215 - protein, 10 aa, Artificial Sequence
  Description of Artificial Sequence: Synthetic peptide
  MOD_RES (4)..(4): phosphorylated serine
  MOD_RES (6)..(6): phosphorylated serine
RRYSRSPYSR

SEQ ID NO: 2216 - protein, 10 aa, Artificial Sequence
  Description of Artificial Sequence: Synthetic peptide
  MOD_RES (4)..(4): phosphorylated serine
RRYSRSPYSR

SEQ ID NO: 2217 - protein, 10 aa, Artificial Sequence
  Description of Artificial Sequence: Synthetic peptide
  MOD_RES (6)..(6): phosphorylated serine
RRYSRSPYSR

SEQ ID NO: 2218 - protein, 10 aa, Artificial Sequence
  Description of Artificial Sequence: Synthetic peptide
  MOD_RES (4)..(4): phosphorylated threonine
RRYTNRVVTK

SEQ ID NO: 2219 - protein, 10 aa, Artificial Sequence
  Description of Artificial Sequence: Synthetic peptide
  MOD_RES (4)..(4): phosphorylated threonine
RRYTNRVVTL

SEQ ID NO: 2220 - protein, 10 aa, Artificial Sequence
  Description of Artificial Sequence: Synthetic peptide
  MOD_RES (4)..(4): phosphorylated threonine
RRYTNRVVTM

SEQ ID NO: 2221 - protein, 10 aa, Artificial Sequence
  Description of Artificial Sequence: Synthetic peptide
  MOD_RES (4)..(4): phosphorylated threonine
RRYTNRVVTR

SEQ ID NO: 2222 - protein, 9 aa, Artificial Sequence
  Description of Artificial Sequence: Synthetic peptide
  MOD_RES (4)..(4): phosphorylated serine
RSASFSRKV

SEQ ID NO: 2223 - protein, 13 aa, Artificial Sequence
  Description of Artificial Sequence: Synthetic peptide
  MOD_RES (4)..(4): phosphorylated serine
RSASPDDDLGSSN

SEQ ID NO: 2224 - protein, 11 aa, Artificial Sequence
  Description of Artificial Sequence: Synthetic peptide
  MOD_RES (4)..(4): phosphorylated serine
RSASSATQVHK

SEQ ID NO: 2225 - protein, 11 aa, Artificial Sequence
  Description of Artificial Sequence: Synthetic peptide
  MOD_RES (4)..(4): phosphorylated serine
RSASSATQVHY

SEQ ID NO: 2226 - protein, 13 aa, Artificial Sequence
  Description of Artificial Sequence: Synthetic peptide
  MOD_RES (7)..(7): phosphorylated serine
RSDPSKSPGSLRY

SEQ ID NO: 2227 - protein, 9 aa, Artificial Sequence
  Description of Artificial Sequence: Synthetic peptide
  MOD_RES (4)..(4): phosphorylated serine
RSDSPKIDL

SEQ ID NO: 2228 - protein, 9 aa, Artificial Sequence
  Description of Artificial Sequence: Synthetic peptide
  MOD_RES (4)..(4): phosphorylated serine
RSDSPKIDY

SEQ ID NO: 2229 - protein, 9 aa, Artificial Sequence
  Description of Artificial Sequence: Synthetic peptide
  MOD_RES (4)..(4): phosphorylated serine
RSDSRAQAV

SEQ ID NO: 2230 - protein, 9 aa, Artificial Sequence
  Description of Artificial Sequence: Synthetic peptide
  MOD_RES (4)..(4): phosphorylated serine
RSDSRAQAY

SEQ ID NO: 2231 - protein, 9 aa, Artificial Sequence
  Description of Artificial Sequence: Synthetic peptide
  MOD_RES (4)..(4): phosphorylated serine
RSDSVGENL

SEQ ID NO: 2232 - protein, 9 aa, Artificial Sequence
  Description of Artificial Sequence: Synthetic peptide
  MOD_RES (4)..(4): phosphorylated serine
RSDSVGENY

SEQ ID NO: 2233 - protein, 8 aa, Artificial Sequence
  Description of Artificial Sequence: Synthetic peptide
  MOD_RES (4)..(4): phosphorylated serine
RSDSYVEL

SEQ ID NO: 2234 - protein, 11 aa, Artificial Sequence
  Description of Artificial Sequence: Synthetic peptide
  MOD_RES (4)..(4): phosphorylated serine
RSDSYVELSQY

SEQ ID NO: 2235 - protein, 13 aa, Artificial Sequence
  Description of Artificial Sequence: Synthetic peptide
  MOD_RES (7)..(7): phosphorylated serine
RSEPSKSPGSLRY

SEQ ID NO: 2236 - protein, 9 aa, Artificial Sequence
  Description of Artificial Sequence: Synthetic peptide
  MOD_RES (4)..(4): phosphorylated serine
RSESKDRKF

SEQ ID NO: 2237 - protein, 9 aa, Artificial Sequence
  Description of Artificial Sequence: Synthetic peptide
  MOD_RES (4)..(4): phosphorylated serine
RSESKDRKL

SEQ ID NO: 2238 - protein, 9 aa, Artificial Sequence
  Description of Artificial Sequence: Synthetic peptide
  MOD_RES (4)..(4): phosphorylated serine
RSESKDRKM

SEQ ID NO: 2239 - protein, 9 aa, Artificial Sequence
  Description of Artificial Sequence: Synthetic peptide
  MOD_RES (4)..(4): phosphorylated serine
RSESKDRKV

SEQ ID NO: 2240 - protein, 9 aa, Artificial Sequence
  Description of Artificial Sequence: Synthetic peptide
  MOD_RES (4)..(4): phosphorylated serine
RSESPKIDL

SEQ ID NO: 2241 - protein, 9 aa, Artificial Sequence
  Description of Artificial Sequence: Synthetic peptide
  MOD_RES (4)..(4): phosphorylated serine
RSESPKIDY

SEQ ID NO: 2242 - protein, 9 aa, Artificial Sequence
  Description of Artificial Sequence: Synthetic peptide
  MOD_RES (4)..(4): phosphorylated serine
RSESPPAEL

SEQ ID NO: 2243 - protein, 9 aa, Artificial Sequence
  Description of Artificial Sequence: Synthetic peptide
  MOD_RES (4)..(4): phosphorylated serine
RSESRAQAV

SEQ ID NO: 2244 - protein, 9 aa, Artificial Sequence
  Description of Artificial Sequence: Synthetic peptide
  MOD_RES (4)..(4): phosphorylated serine
RSESRAQAY

SEQ ID NO: 2245 - protein, 9 aa, Artificial Sequence
  Description of Artificial Sequence: Synthetic peptide
  MOD_RES (4)..(4): phosphorylated serine
RSESVGENL

SEQ ID NO: 2246 - protein, 9 aa, Artificial Sequence
  Description of Artificial Sequence: Synthetic peptide
  MOD_RES (4)..(4): phosphorylated serine
RSESVGENY

SEQ ID NO: 2247 - protein, 11 aa, Artificial Sequence
  Description of Artificial Sequence: Synthetic peptide
  MOD_RES (4)..(4): phosphorylated serine
RSESYVELSQY

SEQ ID NO: 2248 - protein, 9 aa, Artificial Sequence
  Description of Artificial Sequence: Synthetic peptide
  MOD_RES (4)..(4): phosphorylated serine
RSFSPTMKV

SEQ ID NO: 2249 - protein, 9 aa, Artificial Sequence
  Description of Artificial Sequence: Synthetic peptide
  MOD_RES (4)..(4): phosphorylated serine
RSGSLERKF

SEQ ID NO: 2250 - protein, 9 aa, Artificial Sequence
  Description of Artificial Sequence: Synthetic peptide
  MOD_RES (4)..(4): phosphorylated serine
RSGSLERKL

SEQ ID NO: 2251 - protein, 9 aa, Artificial Sequence
  Description of Artificial Sequence: Synthetic peptide
  MOD_RES (4)..(4): phosphorylated serine
RSGSLERKM

SEQ ID NO: 2252 - protein, 9 aa, Artificial Sequence
  Description of Artificial Sequence: Synthetic peptide
  MOD_RES (4)..(4): phosphorylated serine
RSGSLERKV

SEQ ID NO: 2253 - protein, 9 aa, Artificial Sequence
  Description of Artificial Sequence: Synthetic peptide
  MOD_RES (5)..(5): phosphorylated serine
RSHSSPASL

SEQ ID NO: 2254 - protein, 9 aa, Artificial Sequence
  Description of Artificial Sequence: Synthetic peptide
  MOD_RES (4)..(4): phosphorylated serine
RSISVGENL

SEQ ID NO: 2255 - protein, 9 aa, Artificial Sequence
  Description of Artificial Sequence: Synthetic peptide
  MOD_RES (4)..(4): phosphorylated serine
RSLSESYEL

SEQ ID NO: 2256 - protein, 9 aa, Artificial Sequence
  Description of Artificial Sequence: Synthetic peptide
  MOD_RES (4)..(4): phosphorylated serine
RSLSPGGAA

SEQ ID NO: 2257 - protein, 9 aa, Artificial Sequence
  Description of Artificial Sequence: Synthetic peptide
  MOD_RES (4)..(4): phosphorylated serine
RSLSPGGAF

SEQ ID NO: 2258 - protein, 9 aa, Artificial Sequence
  Description of Artificial Sequence: Synthetic peptide
  MOD_RES (4)..(4): phosphorylated serine
RSLSPGGAL

SEQ ID NO: 2259 - protein, 9 aa, Artificial Sequence
  Description of Artificial Sequence: Synthetic peptide
  MOD_RES (4)..(4): phosphorylated serine
RSLSPGGAM

SEQ ID NO: 2260 - protein, 9 aa, Artificial Sequence
  Description of Artificial Sequence: Synthetic peptide
  MOD_RES (4)..(4): phosphorylated serine
RSLSPGGAV

SEQ ID NO: 2261 - protein, 8 aa, Artificial Sequence
  Description of Artificial Sequence: Synthetic peptide
  MOD_RES (4)..(4): phosphorylated serine
RSLSPLLF

SEQ ID NO: 2262 - protein, 8 aa, Artificial Sequence
  Description of Artificial Sequence: Synthetic peptide
  MOD_RES (4)..(4): phosphorylated serine
RSLSPLLL

SEQ ID NO: 2263 - protein, 8 aa, Artificial Sequence
  Description of Artificial Sequence: Synthetic peptide
  MOD_RES (4)..(4): phosphorylated serine
RSLSPLLM

SEQ ID NO: 2264 - protein, 8 aa, Artificial Sequence
  Description of Artificial Sequence: Synthetic peptide
  MOD_RES (4)..(4): phosphorylated serine
RSLSPLLV

SEQ ID NO: 2265 - protein, 10 aa, Artificial Sequence
  Description of Artificial Sequence: Synthetic peptide
  MOD_RES (4)..(4): phosphorylated serine
RSLSQELVGV

SEQ ID NO: 2266 - protein, 9 aa, Artificial Sequence
  Description of Artificial Sequence: Synthetic peptide
  MOD_RES (4)..(4): phosphorylated serine
RSLSVEIVK

SEQ ID NO: 2267 - protein, 9 aa, Artificial Sequence
  Description of Artificial Sequence: Synthetic peptide
  MOD_RES (4)..(4): phosphorylated serine
RSLSVEIVY

SEQ ID NO: 2268 - protein, 9 aa, Artificial Sequence
  Description of Artificial Sequence: Synthetic peptide
  MOD_RES (4)..(4): phosphorylated serine
RSMSMPVAH

SEQ ID NO: 2269 - protein, 9 aa, Artificial Sequence
  Description of Artificial Sequence: Synthetic peptide
  MOD_RES (4)..(4): phosphorylated serine
RSMSMPVAK

SEQ ID NO: 2270 - protein, 18 aa, Artificial Sequence
  Description of Artificial Sequence: Synthetic peptide
  MOD_RES (2)..(2): phosphorylated serine
RSPEDEYELLMPHRISSH

SEQ ID NO: 2271 - protein, 9 aa, Artificial Sequence
  Description of Artificial Sequence: Synthetic peptide
  MOD_RES (5)..(5): phosphorylated serine
RSRRSPLLK

SEQ ID NO: 2272 - protein, 9 aa, Artificial Sequence
  Description of Artificial Sequence: Synthetic peptide
  MOD_RES (5)..(5): phosphorylated serine
RSRRSPLLY

SEQ ID NO: 2273 - protein, 8 aa, Artificial Sequence
  Description of Artificial Sequence: Synthetic peptide
  MOD_RES (4)..(4): phosphorylated serine
RSRSPLEL

SEQ ID NO: 2274 - protein, 10 aa, Artificial Sequence
  Description of Artificial Sequence: Synthetic peptide
  MOD_RES (4)..(4): phosphorylated serine
RSRSPPPVSK

SEQ ID NO: 2275 - protein, 10 aa, Artificial Sequence
  Description of Artificial Sequence: Synthetic peptide
  MOD_RES (4)..(4): phosphorylated serine
RSRSPPPVSY

SEQ ID NO: 2276 - protein, 9 aa, Artificial Sequence
  Description of Artificial Sequence: Synthetic peptide
  MOD_RES (4)..(4): phosphorylated serine
RSRSPRPAF

SEQ ID NO: 2277 - protein, 9 aa, Artificial Sequence
  Description of Artificial Sequence: Synthetic peptide
  MOD_RES (4)..(4): phosphorylated serine
RSRSPRPAI

SEQ ID NO: 2278 - protein, 9 aa, Artificial Sequence
  Description of Artificial Sequence: Synthetic peptide
  MOD_RES (4)..(4): phosphorylated serine
RSRSPRPAL

SEQ ID NO: 2279 - protein, 9 aa, Artificial Sequence
  Description of Artificial Sequence: Synthetic peptide
  MOD_RES (4)..(4): phosphorylated serine
RSRSPRPAM

SEQ ID NO: 2280 - protein, 9 aa, Artificial Sequence
  Description of Artificial Sequence: Synthetic peptide
  MOD_RES (4)..(4): phosphorylated serine
RSRSPRPAV

SEQ ID NO: 2281 - protein, 9 aa, Artificial Sequence
  Description of Artificial Sequence: Synthetic peptide
  MOD_RES (4)..(4): phosphorylated serine
  MOD_RES (9)..(9): Any amino acid
RSRSPRPAX

SEQ ID NO: 2282 - protein, 10 aa, Artificial Sequence
  Description of Artificial Sequence: Synthetic peptide
  MOD_RES (5)..(5): phosphorylated serine
RSRTSPITRR

SEQ ID NO: 2283 - protein, 10 aa, Artificial Sequence
  Description of Artificial Sequence: Synthetic peptide
  MOD_RES (5)..(5): phosphorylated serine
RSRTSPITRY

SEQ ID NO: 2284 - protein, 9 aa, Artificial Sequence
  Description of Artificial Sequence: Synthetic peptide
  MOD_RES (4)..(4): phosphorylated serine
RSSSLIRHK

SEQ ID NO: 2285 - protein, 9 aa, Artificial Sequence
  Description of Artificial Sequence: Synthetic peptide
  MOD_RES (4)..(4): phosphorylated serine
RSSSLIRHY

SEQ ID NO: 2286 - protein, 9 aa, Artificial Sequence
  Description of Artificial Sequence: Synthetic peptide
  MOD_RES (4)..(4): phosphorylated serine
RSVSLSMRK

SEQ ID NO: 2287 - protein, 9 aa, Artificial Sequence
  Description of Artificial Sequence: Synthetic peptide
  MOD_RES (4)..(4): phosphorylated serine
RSVSLSMRY

SEQ ID NO: 2288 - protein, 14 aa, Artificial Sequence
  Description of Artificial Sequence: Synthetic peptide
  MOD_RES (2)..(2): phosphorylated serine
RSWKYNQSISLRRP

SEQ ID NO: 2289 - protein, 9 aa, Artificial Sequence
  Description of Artificial Sequence: Synthetic peptide
  MOD_RES (4)..(4): phosphorylated serine
  MOD_RES (8)..(8): phosphorylated serine
RSYSGSRSK

SEQ ID NO: 2290 - protein, 9 aa, Artificial Sequence
  Description of Artificial Sequence: Synthetic peptide
  MOD_RES (4)..(4): phosphorylated serine
  MOD_RES (8)..(8): phosphorylated serine
RSYSGSRSR

SEQ ID NO: 2291 - protein, 9 aa, Artificial Sequence
  Description of Artificial Sequence: Synthetic peptide
  MOD_RES (4)..(4): phosphorylated serine
  MOD_RES (8)..(8): phosphorylated serine
RSYSGSRSY

SEQ ID NO: 2292 - protein, 10 aa, Artificial Sequence
  Description of Artificial Sequence: Synthetic peptide
  MOD_RES (4)..(4): phosphorylated serine
RSYSPDHRQK

SEQ ID NO: 2293 - protein, 10 aa, Artificial Sequence
  Description of Artificial Sequence: Synthetic peptide
  MOD_RES (4)..(4): phosphorylated serine
RSYSPDHRQY

SEQ ID NO: 2294 - protein, 9 aa, Artificial Sequence
  Description of Artificial Sequence: Synthetic peptide
  MOD_RES (4)..(4): phosphorylated serine
RSYSPERSK

SEQ ID NO: 2295 - protein, 9 aa, Artificial Sequence
  Description of Artificial Sequence: Synthetic peptide
  MOD_RES (4)..(4): phosphorylated serine
RSYSPERSY

SEQ ID NO: 2296 - protein, 9 aa, Artificial Sequence
  Description of Artificial Sequence: Synthetic peptide
  MOD_RES (4)..(4): phosphorylated serine
RSYSPRNSR

SEQ ID NO: 2297 - protein, 9 aa, Artificial Sequence
  Description of Artificial Sequence: Synthetic peptide
  MOD_RES (4)..(4): phosphorylated serine
RSYSPRNSY

SEQ ID NO: 2298 - protein, 9 aa, Artificial Sequence
  Description of Artificial Sequence: Synthetic peptide
  MOD_RES (6)..(6): phosphorylated serine
RSYSRSFSK

SEQ ID NO: 2299 - protein, 9 aa, Artificial Sequence
  Description of Artificial Sequence: Synthetic peptide
  MOD_RES (4)..(4): phosphorylated serine
RSYSRSFSR

SEQ ID NO: 2300 - protein, 9 aa, Artificial Sequence
  Description of Artificial Sequence: Synthetic peptide
  MOD_RES (6)..(6): phosphorylated serine
RSYSRSFSR

SEQ ID NO: 2301 - protein, 9 aa, Artificial Sequence
  Description of Artificial Sequence: Synthetic peptide
  MOD_RES (6)..(6): phosphorylated serine
RSYSRSFSY

SEQ ID NO: 2302 - protein, 9 aa, Artificial Sequence
  Description of Artificial Sequence: Synthetic peptide
  MOD_RES (4)..(4): phosphorylated serine
RSYSYPRQK

SEQ ID NO: 2303 - protein, 9 aa, Artificial Sequence
  Description of Artificial Sequence: Synthetic peptide
  MOD_RES (4)..(4): phosphorylated serine
RSYSYPRQY

SEQ ID NO: 2304 - protein, 14 aa, Artificial Sequence
  Description of Artificial Sequence: Synthetic peptide
  MOD_RES (12)..(12): phosphorylated serine
RSYVTTSTRTYSLG

SEQ ID NO: 2305 - protein, 9 aa, Artificial Sequence
  Description of Artificial Sequence: Synthetic peptide
  MOD_RES (4)..(4): phosphorylated serine
RTASFAVRK

SEQ ID NO: 2306 - protein, 9 aa, Artificial Sequence
  Description of Artificial Sequence: Synthetic peptide
  MOD_RES (4)..(4): phosphorylated serine
RTASFAVRY

SEQ ID NO: 2307 - protein, 9 aa, Artificial Sequence
  Description of Artificial Sequence: Synthetic peptide
  MOD_RES (4)..(4): phosphorylated serine
RTASLIIKV

SEQ ID NO: 2308 - protein, 10 aa, Artificial Sequence
  Description of Artificial Sequence: Synthetic peptide
  MOD_RES (4)..(4): phosphorylated serine
RTASPPPPPK

SEQ ID NO: 2309 - protein, 13 aa, Artificial Sequence
  Description of Artificial Sequence: Synthetic peptide
  MOD_RES (7)..(7): phosphorylated serine
RTDPSKSPGSLRY

SEQ ID NO: 2310 - protein, 9 aa, Artificial Sequence
  Description of Artificial Sequence: Synthetic peptide
  MOD_RES (4)..(4): phosphorylated serine
RTDSPKIDL

SEQ ID NO: 2311 - protein, 9 aa, Artificial Sequence
  Description of Artificial Sequence: Synthetic peptide
  MOD_RES (4)..(4): phosphorylated serine
RTDSPKIDY

SEQ ID NO: 2312 - protein, 9 aa, Artificial Sequence
  Description of Artificial Sequence: Synthetic peptide
  MOD_RES (4)..(4): phosphorylated serine
RTDSRAQAV

SEQ ID NO: 2313 - protein, 9 aa, Artificial Sequence
  Description of Artificial Sequence: Synthetic peptide
  MOD_RES (4)..(4): phosphorylated serine
RTDSRAQAY

SEQ ID NO: 2314 - protein, 11 aa, Artificial Sequence
  Description of Artificial Sequence: Synthetic peptide
  MOD_RES (4)..(4): phosphorylated serine
RTDSYVELSQY

SEQ ID NO: 2315 - protein, 13 aa, Artificial Sequence
  Description of Artificial Sequence: Synthetic peptide
  MOD_RES (7)..(7): phosphorylated serine
RTEPSKSPGSLRY

SEQ ID NO: 2316 - protein, 10 aa, Artificial Sequence
  Description of Artificial Sequence: Synthetic peptide
  MOD_RES (4)..(4): phosphorylated serine
RTESDSGLKF

SEQ ID NO: 2317 - protein, 10 aa, Artificial Sequence
  Description of Artificial Sequence: Synthetic peptide
  MOD_RES (4)..(4): phosphorylated serine
RTESDSGLKK

SEQ ID NO: 2318 - protein, 10 aa, Artificial Sequence
  Description of Artificial Sequence: Synthetic peptide
  MOD_RES (4)..(4): phosphorylated serine
RTESDSGLKL

SEQ ID NO: 2319 - protein, 10 aa, Artificial Sequence
  Description of Artificial Sequence: Synthetic peptide
  MOD_RES (4)..(4): phosphorylated serine
RTESDSGLKM

SEQ ID NO: 2320 - protein, 10 aa, Artificial Sequence
  Description of Artificial Sequence: Synthetic peptide
  MOD_RES (4)..(4): phosphorylated serine
RTESDSGLKV

SEQ ID NO: 2321 - protein, 9 aa, Artificial Sequence
  Description of Artificial Sequence: Synthetic peptide
  MOD_RES (4)..(4): phosphorylated serine
RTESPKIDL

SEQ ID NO: 2322 - protein, 9 aa, Artificial Sequence
  Description of Artificial Sequence: Synthetic peptide
  MOD_RES (4)..(4): phosphorylated serine
RTESPKIDY

SEQ ID NO: 2323 - protein, 9 aa, Artificial Sequence
  Description of Artificial Sequence: Synthetic peptide
  MOD_RES (4)..(4): phosphorylated serine
RTESRAQAV

SEQ ID NO: 2324 - protein, 9 aa, Artificial Sequence
  Description of Artificial Sequence: Synthetic peptide
  MOD_RES (4)..(4): phosphorylated serine
RTESRAQAY

SEQ ID NO: 2325 - protein, 11 aa, Artificial Sequence
  Description of Artificial Sequence: Synthetic peptide
  MOD_RES (4)..(4): phosphorylated serine
RTESYVELSQY

SEQ ID NO: 2326 - protein, 9 aa, Artificial Sequence
  Description of Artificial Sequence: Synthetic peptide
  MOD_RES (4)..(4): phosphorylated serine
RTFSLDTIL

SEQ ID NO: 2327 - protein, 9 aa, Artificial Sequence
  Description of Artificial Sequence: Synthetic peptide
  MOD_RES (4)..(4): phosphorylated serine
RTFSPTYGF

SEQ ID NO: 2328 - protein, 9 aa, Artificial Sequence
  Description of Artificial Sequence: Synthetic peptide
  MOD_RES (4)..(4): phosphorylated serine
RTFSPTYGL

SEQ ID NO: 2329 - protein, 9 aa, Artificial Sequence
  Description of Artificial Sequence: Synthetic peptide
  MOD_RES (4)..(4): phosphorylated serine
RTFSPTYGM

SEQ ID NO: 2330 - protein, 9 aa, Artificial Sequence
  Description of Artificial Sequence: Synthetic peptide
  MOD_RES (4)..(4): phosphorylated serine
RTFSPTYGV

SEQ ID NO: 2331 - protein, 9 aa, Artificial Sequence
  Description of Artificial Sequence: Synthetic peptide
  MOD_RES (4)..(4): phosphorylated serine
RTHSLLLLL

SEQ ID NO: 2332 - protein, 9 aa, Artificial Sequence
  Description of Artificial Sequence: Synthetic peptide
  MOD_RES (4)..(4): phosphorylated serine
RTLSHISEA

SEQ ID NO: 2333 - protein, 9 aa, Artificial Sequence
  Description of Artificial Sequence: Synthetic peptide
  MOD_RES (4)..(4): phosphorylated serine
RTLSHISEV

SEQ ID NO: 2334 - protein, 10 aa, Artificial Sequence
  Description of Artificial Sequence: Synthetic peptide
  MOD_RES (4)..(4): phosphorylated serine
RTLSPEIITV

SEQ ID NO: 2335 - protein, 11 aa, Artificial Sequence
  Description of Artificial Sequence: Synthetic peptide
  MOD_RES (4)..(4): phosphorylated serine
RTMSEAALVRK

SEQ ID NO: 2336 - protein, 9 aa, Artificial Sequence
  Description of Artificial Sequence: Synthetic peptide
  MOD_RES (4)..(4): phosphorylated serine
RTNSPGFQK

SEQ ID NO: 2337 - protein, 9 aa, Artificial Sequence
  Description of Artificial Sequence: Synthetic peptide
  MOD_RES (4)..(4): phosphorylated serine
RTPSDVKEL

SEQ ID NO: 2338 - protein, 10 aa, Artificial Sequence
  Description of Artificial Sequence: Synthetic peptide
  MOD_RES (4)..(4): phosphorylated serine
RTPSFLKKNK

SEQ ID NO: 2339 - protein, 10 aa, Artificial Sequence
  Description of Artificial Sequence: Synthetic peptide
  MOD_RES (4)..(4): phosphorylated serine
RTPSFLKKNY

SEQ ID NO: 2340 - protein, 11 aa, Artificial Sequence
  Description of Artificial Sequence: Synthetic peptide
  MOD_RES (4)..(4): phosphorylated serine
RTRSLSSLREK

SEQ ID NO: 2341 - protein, 11 aa, Artificial Sequence
  Description of Artificial Sequence: Synthetic peptide
  MOD_RES (4)..(4): phosphorylated serine
RTRSLSSLREY

SEQ ID NO: 2342 - protein, 9 aa, Artificial Sequence
  Description of Artificial Sequence: Synthetic peptide
  MOD_RES (4)..(4): phosphorylated serine
RTRSPSPTF

SEQ ID NO: 2343 - protein, 9 aa, Artificial Sequence
  Description of Artificial Sequence: Synthetic peptide
  MOD_RES (4)..(4): phosphorylated serine
RTRSPSPTL

SEQ ID NO: 2344 - protein, 9 aa, Artificial Sequence
  Description of Artificial Sequence: Synthetic peptide
  MOD_RES (4)..(4): phosphorylated serine
RTRSPSPTM

SEQ ID NO: 2345 - protein, 9 aa, Artificial Sequence
  Description of Artificial Sequence: Synthetic peptide
  MOD_RES (4)..(4): phosphorylated serine
RTRSPSPTV

SEQ ID NO: 2346 - protein, 9 aa, Artificial Sequence
  Description of Artificial Sequence: Synthetic peptide
  MOD_RES (4)..(4): phosphorylated serine
RTSSFALNL

SEQ ID NO: 2347 - protein, 9 aa, Artificial Sequence
  Description of Artificial Sequence: Synthetic peptide
  MOD_RES (4)..(4): phosphorylated serine
RTSSFTEQL

SEQ ID NO: 2348 - protein, 9 aa, Artificial Sequence
  Description of Artificial Sequence: Synthetic peptide
  MOD_RES (4)..(4): phosphorylated serine
RTSSFTFQN

SEQ ID NO: 2349 - protein, 9 aa, Artificial Sequence
  Description of Artificial Sequence: Synthetic peptide
  MOD_RES (6)..(6): phosphorylated threonine
RTSSFTFQN

SEQ ID NO: 2350 - protein, 9 aa, Artificial Sequence
  Description of Artificial Sequence: Synthetic peptide
  MOD_RES (4)..(4): phosphorylated serine
RTSSPLFNK

SEQ ID NO: 2351 - protein, 9 aa, Artificial Sequence
  Description of Artificial Sequence: Synthetic peptide
  MOD_RES (5)..(5): phosphorylated serine
RTYKSPLRH

SEQ ID NO: 2352 - protein, 9 aa, Artificial Sequence
  Description of Artificial Sequence: Synthetic peptide
  MOD_RES (5)..(5): phosphorylated serine
RTYKSPLRK

SEQ ID NO: 2353 - protein, 9 aa, Artificial Sequence
  Description of Artificial Sequence: Synthetic peptide
  MOD_RES (5)..(5): phosphorylated serine
RTYKSPLRY

SEQ ID NO: 2354 - protein, 9 aa, Artificial Sequence
  Description of Artificial Sequence: Synthetic peptide
  MOD_RES (4)..(4): phosphorylated serine
RTYSGPMNK

SEQ ID NO: 2355 - protein, 10 aa, Artificial Sequence
  Description of Artificial Sequence: Synthetic peptide
  MOD_RES (4)..(4): phosphorylated serine
RTYSGPMNKV

SEQ ID NO: 2356 - protein, 9 aa, Artificial Sequence
  Description of Artificial Sequence: Synthetic peptide
  MOD_RES (4)..(4): phosphorylated serine
RTYSHGTYR

SEQ ID NO: 2357 - protein, 9 aa, Artificial Sequence
  Description of Artificial Sequence: Synthetic peptide
  MOD_RES (4)..(4): phosphorylated serine
RVASFAVRK

SEQ ID NO: 2358 - protein, 9 aa, Artificial Sequence
  Description of Artificial Sequence: Synthetic peptide
  MOD_RES (4)..(4): phosphorylated serine
RVASFAVRY

SEQ ID NO: 2359 - protein, 9 aa, Artificial Sequence
  Description of Artificial Sequence: Synthetic peptide
  MOD_RES (4)..(4): phosphorylated serine
RVASPLVHK

SEQ ID NO: 2360 - protein, 9 aa, Artificial Sequence
  Description of Artificial Sequence: Synthetic peptide
  MOD_RES (4)..(4): phosphorylated serine
RVASPLVHY

SEQ ID NO: 2361 - protein, 10 aa, Artificial Sequence
  Description of Artificial Sequence: Synthetic peptide
  MOD_RES (4)..(4): phosphorylated serine
RVASPPPPPK

SEQ ID NO: 2362 - protein, 10 aa, Artificial Sequence
  Description of Artificial Sequence: Synthetic peptide
  MOD_RES (4)..(4): phosphorylated serine
RVASPPPPPY

SEQ ID NO: 2363 - protein, 9 aa, Artificial Sequence
  Description of Artificial Sequence: Synthetic peptide
  MOD_RES (4)..(4): phosphorylated serine
RVASPTSGV

SEQ ID NO: 2364 - protein, 10 aa, Artificial Sequence
  Description of Artificial Sequence: Synthetic peptide
  MOD_RES (4)..(4): phosphorylated serine
RVASPTSGVK

SEQ ID NO: 2365 - protein, 11 aa, Artificial Sequence
  Description of Artificial Sequence: Synthetic peptide
  MOD_RES (4)..(4): phosphorylated serine
RVASPTSGVKK

SEQ ID NO: 2366 - protein, 11 aa, Artificial Sequence
  Description of Artificial Sequence: Synthetic peptide
  MOD_RES (4)..(4): phosphorylated serine
RVASPTSGVKR

SEQ ID NO: 2367 - protein, 10 aa, Artificial Sequence
  Description of Artificial Sequence: Synthetic peptide
  MOD_RES (4)..(4): phosphorylated serine
RVASPTSGVY

SEQ ID NO: 2368 - protein, 9 aa, Artificial Sequence
  Description of Artificial Sequence: Synthetic peptide
  MOD_RES (4)..(4): phosphorylated serine
RVDSPSHGL

SEQ ID NO: 2369 - protein, 9 aa, Artificial Sequence
  Description of Artificial Sequence: Synthetic peptide
  MOD_RES (4)..(4): phosphorylated serine
RVGSLVLNL

SEQ ID NO: 2370 - protein, 9 aa, Artificial Sequence
  Description of Artificial Sequence: Synthetic peptide
  MOD_RES (4)..(4): phosphorylated serine
RVISGVLQL

SEQ ID NO: 2371 - protein, 10 aa, Artificial Sequence
  Description of Artificial Sequence: Synthetic peptide
  MOD_RES (6)..(6): phosphorylated serine
RVKLPSGSKK

SEQ ID NO: 2372 - protein, 11 aa, Artificial Sequence
  Description of Artificial Sequence: Synthetic peptide
  MOD_RES (4)..(4): phosphorylated serine
  MOD_RES (7)..(7): phosphorylated serine
RVKSPGSGHVK

SEQ ID NO: 2373 - protein, 11 aa, Artificial Sequence
  Description of Artificial Sequence: Synthetic peptide
  MOD_RES (4)..(4): phosphorylated serine
  MOD_RES (7)..(7): phosphorylated serine
RVKSPGSGHVY

SEQ ID NO: 2374 - protein, 9 aa, Artificial Sequence
  Description of Artificial Sequence: Synthetic peptide
  MOD_RES (4)..(4): phosphorylated serine
RVKSPISLK

SEQ ID NO: 2375 - protein, 11 aa, Artificial Sequence
  Description of Artificial Sequence: Synthetic peptide
  MOD_RES (4)..(4): phosphorylated serine
RVKSPSPKSER

SEQ ID NO: 2376 - protein, 11 aa, Artificial Sequence
  Description of Artificial Sequence: Synthetic peptide
  MOD_RES (4)..(4): phosphorylated serine
RVKSPSPKSEY

SEQ ID NO: 2377 - protein, 11 aa, Artificial Sequence
  Description of Artificial Sequence: Synthetic peptide
  MOD_RES (4)..(4): phosphorylated threonine
RVKTPTSQSYK

SEQ ID NO: 2378 - protein, 11 aa, Artificial Sequence
  Description of Artificial Sequence: Synthetic peptide
  MOD_RES (4)..(4): phosphorylated threonine
RVKTPTSQSYR

SEQ ID NO: 2379 - protein, 11 aa, Artificial Sequence
  Description of Artificial Sequence: Synthetic peptide
  MOD_RES (4)..(4): phosphorylated threonine
RVKTPTSQSYY

SEQ ID NO: 2380 - protein, 9 aa, Artificial Sequence
  Description of Artificial Sequence: Synthetic peptide
  MOD_RES (5)..(5): phosphorylated threonine
RVKTTPLRR

SEQ ID NO: 2381 - protein, 9 aa, Artificial Sequence
  Description of Artificial Sequence: Synthetic peptide
  MOD_RES (5)..(5): phosphorylated threonine
RVKTTPLRY

SEQ ID NO: 2382 - protein, 12 aa, Artificial Sequence
  Description of Artificial Sequence: Synthetic peptide
  MOD_RES (8)..(8): phosphorylated serine
RVLDRSPSRSAK

SEQ ID NO: 2383 - protein, 12 aa, Artificial Sequence
  Description of Artificial Sequence: Synthetic peptide
  MOD_RES (8)..(8): phosphorylated serine
RVLDRSPSRSAY

SEQ ID NO: 2384 - protein, 9 aa, Artificial Sequence
  Description of Artificial Sequence: Synthetic peptide
  MOD_RES (5)..(5): phosphorylated serine
RVLHSPPAV

SEQ ID NO: 2385 - protein, 9 aa, Artificial Sequence
  Description of Artificial Sequence: Synthetic peptide
  MOD_RES (4)..(4): phosphorylated serine
RVLSGVVTK

SEQ ID NO: 2386 - protein, 9 aa, Artificial Sequence
  Description of Artificial Sequence: Synthetic peptide
  MOD_RES (4)..(4): phosphorylated serine
RVLSPLIIK

SEQ ID NO: 2387 - protein, 9 aa, Artificial Sequence
  Description of Artificial Sequence: Synthetic peptide
  MOD_RES (4)..(4): phosphorylated serine
RVPSLLVLL

SEQ ID NO: 2388 - protein, 9 aa, Artificial Sequence
  Description of Artificial Sequence: Synthetic peptide
  MOD_RES (4)..(4): phosphorylated serine
RVPSSTLKK

SEQ ID NO: 2389 - protein, 9 aa, Artificial Sequence
  Description of Artificial Sequence: Synthetic peptide
  MOD_RES (4)..(4): phosphorylated serine
RVPSSTLKY

SEQ ID NO: 2390 - protein, 10 aa, Artificial Sequence
  Description of Artificial Sequence: Synthetic peptide
  MOD_RES (7)..(7): phosphorylated serine
RVRKLPSTTL

SEQ ID NO: 2391 - protein, 10 aa, Artificial Sequence
  Description of Artificial Sequence: Synthetic peptide
  MOD_RES (5)..(5): phosphorylated serine
RVRQSPLATK

SEQ ID NO: 2392 - protein, 10 aa, Artificial Sequence
  Description of Artificial Sequence: Synthetic peptide
  MOD_RES (5)..(5): phosphorylated serine
RVRQSPLATR

SEQ ID NO: 2393 - protein, 10 aa, Artificial Sequence
  Description of Artificial Sequence: Synthetic peptide
  MOD_RES (5)..(5): phosphorylated serine
RVRQSPLATY

SEQ ID NO: 2394 - protein, 11 aa, Artificial Sequence
  Description of Artificial Sequence: Synthetic peptide
  MOD_RES (5)..(5): phosphorylated serine
RVRRSSFLNAK

SEQ ID NO: 2395 - protein, 11 aa, Artificial Sequence
  Description of Artificial Sequence: Synthetic peptide
  MOD_RES (4)..(4): phosphorylated serine
RVRSLSSLREK

SEQ ID NO: 2396 - protein, 11 aa, Artificial Sequence
  Description of Artificial Sequence: Synthetic peptide
  MOD_RES (4)..(4): phosphorylated serine
RVRSLSSLREY

SEQ ID NO: 2397 - protein, 9 aa, Artificial Sequence
  Description of Artificial Sequence: Synthetic peptide
  MOD_RES (4)..(4): phosphorylated serine
RVRSPTRSF

SEQ ID NO: 2398 - protein, 9 aa, Artificial Sequence
  Description of Artificial Sequence: Synthetic peptide
  MOD_RES (4)..(4): phosphorylated serine
RVRSPTRSL

SEQ ID NO: 2399 - protein, 9 aa, Artificial Sequence
  Description of Artificial Sequence: Synthetic peptide
  MOD_RES (4)..(4): phosphorylated serine
RVRSPTRSM

SEQ ID NO: 2400 - protein, 9 aa, Artificial Sequence
  Description of Artificial Sequence: Synthetic peptide
  MOD_RES (4)..(4): phosphorylated serine
RVRSPTRSP

SEQ ID NO: 2401 - protein, 9 aa, Artificial Sequence
  Description of Artificial Sequence: Synthetic peptide
  MOD_RES (4)..(4): phosphorylated serine
RVRSPTRSV

SEQ ID NO: 2402 - protein, 9 aa, Artificial Sequence
  Description of Artificial Sequence: Synthetic peptide
  MOD_RES (4)..(4): phosphorylated serine
RVSSPISKK

SEQ ID NO: 2403 - protein, 9 aa, Artificial Sequence
  Description of Artificial Sequence: Synthetic peptide
  MOD_RES (4)..(4): phosphorylated serine
RVSSPISKY

SEQ ID NO: 2404 - protein, 9 aa, Artificial Sequence
  Description of Artificial Sequence: Synthetic peptide
  MOD_RES (4)..(4): phosphorylated serine
RVSSRFSSK

SEQ ID NO: 2405 - protein, 9 aa, Artificial Sequence
  Description of Artificial Sequence: Synthetic peptide
  MOD_RES (4)..(4): phosphorylated serine
RVSSRFSSR

SEQ ID NO: 2406 - protein, 9 aa, Artificial Sequence
  Description of Artificial Sequence: Synthetic peptide
  MOD_RES (4)..(4): phosphorylated serine
RVSSRFSSY

SEQ ID NO: 2407 - protein, 10 aa, Artificial Sequence
  Description of Artificial Sequence: Synthetic peptide
  MOD_RES (4)..(4): phosphorylated serine
RVSSVKLISK

SEQ ID NO: 2408 - protein, 10 aa, Artificial Sequence
  Description of Artificial Sequence: Synthetic peptide
  MOD_RES (4)..(4): phosphorylated serine
RVSSVKLISY

SEQ ID NO: 2409 - protein, 9 aa, Artificial Sequence
  Description of Artificial Sequence: Synthetic peptide
  MOD_RES (4)..(4): phosphorylated serine
RVTSAEIKL

SEQ ID NO: 2410 - protein, 9 aa, Artificial Sequence
  Description of Artificial Sequence: Synthetic peptide
  MOD_RES (4)..(4): phosphorylated serine
RVVSLSMRK

SEQ ID NO: 2411 - protein, 9 aa, Artificial Sequence
  Description of Artificial Sequence: Synthetic peptide
  MOD_RES (4)..(4): phosphorylated serine
RVVSLSMRY

SEQ ID NO: 2412 - protein, 10 aa, Artificial Sequence
  Description of Artificial Sequence: Synthetic peptide
  MOD_RES (9)..(9): phosphorylated serine
RVWEDRPSSA

SEQ ID NO: 2413 - protein, 11 aa, Artificial Sequence
  Description of Artificial Sequence: Synthetic peptide
  MOD_RES (4)..(4): phosphorylated serine
RVWSPPRVHKV

SEQ ID NO: 2414 - protein, 9 aa, Artificial Sequence
  Description of Artificial Sequence: Synthetic peptide
  MOD_RES (5)..(5): phosphorylated tyrosine
RVYQYIQSR

SEQ ID NO: 2415 - protein, 11 aa, Artificial Sequence
  Description of Artificial Sequence: Synthetic peptide
  MOD_RES (5)..(5): phosphorylated tyrosine
RVYQYIQSRFK

SEQ ID NO: 2416 - protein, 11 aa, Artificial Sequence
  Description of Artificial Sequence: Synthetic peptide
  MOD_RES (5)..(5): phosphorylated tyrosine
RVYQYIQSRFY

SEQ ID NO: 2417 - protein, 10 aa, Artificial Sequence
  Description of Artificial Sequence: Synthetic peptide
  MOD_RES (5)..(5): phosphorylated tyrosine
RVYQYIQSRK

SEQ ID NO: 2418 - protein, 10 aa, Artificial Sequence
  Description of Artificial Sequence: Synthetic peptide
  MOD_RES (5)..(5): phosphorylated tyrosine
RVYQYIQSRY

SEQ ID NO: 2419 - protein, 9 aa, Artificial Sequence
  Description of Artificial Sequence: Synthetic peptide
  MOD_RES (4)..(4): phosphorylated serine
RVYSPYNHK

SEQ ID NO: 2420 - protein, 9 aa, Artificial Sequence
  Description of Artificial Sequence: Synthetic peptide
  MOD_RES (4)..(4): phosphorylated serine
RVYSPYNHR

SEQ ID NO: 2421 - protein, 9 aa, Artificial Sequence
  Description of Artificial Sequence: Synthetic peptide
  MOD_RES (4)..(4): phosphorylated serine
RVYSPYNHY

SEQ ID NO: 2422 - protein, 9 aa, Artificial Sequence
  Description of Artificial Sequence: Synthetic peptide
  MOD_RES (6)..(6): phosphorylated serine
RVYSRSFSK

SEQ ID NO: 2423 - protein, 9 aa, Artificial Sequence
  Description of Artificial Sequence: Synthetic peptide
  MOD_RES (6)..(6): phosphorylated serine
RVYSRSFSY

SEQ ID NO: 2424 - protein, 9 aa, Artificial Sequence
  Description of Artificial Sequence: Synthetic peptide
  MOD_RES (4)..(4): phosphorylated serine
RYPSNLQLF

SEQ ID NO: 2425 - protein, 9 aa, Artificial Sequence
  Description of Artificial Sequence: Synthetic peptide
  MOD_RES (4)..(4): phosphorylated threonine
RYQTQPVTL

SEQ ID NO: 2426 - protein, 22 aa, Artificial Sequence
  Description of Artificial Sequence: Synthetic peptide
  MOD_RES (16)..(16): phosphorylated serine
SAARESHPHGVKRSASPDDDLG

SEQ ID NO: 2427 - protein, 14 aa, Artificial Sequence
  Description of Artificial Sequence: Synthetic peptide
  MOD_RES (5)..(5): phosphorylated serine
SARGSPTRPNPPVR

SEQ ID NO: 2428 - protein, 9 aa, Artificial Sequence
  Description of Artificial Sequence: Synthetic peptide
  MOD_RES (5)..(5): phosphorylated threonine
SARRTPVSY

SEQ ID NO: 2429 - protein, 10 aa, Artificial Sequence
  Description of Artificial Sequence: Synthetic peptide
  MOD_RES (1)..(1): phosphorylated serine
SDDEKMPDLE

SEQ ID NO: 2430 - protein, 12 aa, Artificial Sequence
  Description of Artificial Sequence: Synthetic peptide
  MOD_RES (1)..(1): phosphorylated serine
SDFHAERAAREK

SEQ ID NO: 2431 - protein, 9 aa, Artificial Sequence
  Description of Artificial Sequence: Synthetic peptide
  MOD_RES (3)..(3): oxidized methionine
  MOD_RES (8)..(8): phosphorylated serine
SDMPRAHSF

SEQ ID NO: 2432 - protein, 9 aa, Artificial Sequence
  Description of Artificial Sequence: Synthetic peptide
  MOD_RES (8)..(8): phosphorylated serine
SDMPRAHSF

SEQ ID NO: 2433 - protein, 9 aa, Artificial Sequence
  Description of Artificial Sequence: Synthetic peptide
  MOD_RES (8)..(8): phosphorylated serine
SEFKAMDSI

SEQ ID NO: 2434 - protein, 9 aa, Artificial Sequence
  Description of Artificial Sequence: Synthetic peptide
  MOD_RES (4)..(4): phosphorylated serine
SEGSLHRKF

SEQ ID NO: 2435 - protein, 9 aa, Artificial Sequence
  Description of Artificial Sequence: Synthetic peptide
  MOD_RES (4)..(4): phosphorylated serine
SEGSLHRKW

SEQ ID NO: 2436 - protein, 9 aa, Artificial Sequence
  Description of Artificial Sequence: Synthetic peptide
  MOD_RES (4)..(4): phosphorylated serine
SEGSLHRKY

SEQ ID NO: 2437 - protein, 9 aa, Artificial Sequence
  Description of Artificial Sequence: Synthetic peptide
  MOD_RES (4)..(4): phosphorylated serine
SELSPGRSV

SEQ ID NO: 2438 - protein, 9 aa, Artificial Sequence
  Description of Artificial Sequence: Synthetic peptide
  MOD_RES (4)..(4): phosphorylated serine
SFDSGSVRL

SEQ ID NO: 2439 - protein, 14 aa, Artificial Sequence
  Description of Artificial Sequence: Synthetic peptide
  MOD_RES (6)..(6): phosphorylated serine
SGGAQSPLRYLHVL

SEQ ID NO: 2440 - protein, 19 aa, Artificial Sequence
  Description of Artificial Sequence: Synthetic peptide
  MOD_RES (1)..(1): phosphorylated serine
SGGDDDWTHLSSKEVDPST

SEQ ID NO: 2441 - protein, 20 aa, Artificial Sequence
  Description of Artificial Sequence: Synthetic peptide
  MOD_RES (1)..(1): phosphorylated serine
SGGDDDWTHLSSKEVDPSTG

SEQ ID NO: 2442 - protein, 21 aa, Artificial Sequence
  Description of Artificial Sequence: Synthetic peptide
  MOD_RES (1)..(1): phosphorylated serine
SGGDDDWTHLSSKEVDPSTGE

SEQ ID NO: 2443 - protein, 22 aa, Artificial Sequence
  Description of Artificial Sequence: Synthetic peptide
  MOD_RES (1)..(1): phosphorylated serine
SGGDDDWTHLSSKEVDPSTGEL

SEQ ID NO: 2444 - protein, 23 aa, Artificial Sequence
  Description of Artificial Sequence: Synthetic peptide
  MOD_RES (1)..(1): phosphorylated serine
SGGDDDWTHLSSKEVDPSTGELQ

SEQ ID NO: 2445 - protein, 18 aa, Artificial Sequence
  Description of Artificial Sequence: Synthetic peptide
  MOD_RES (11)..(11): phosphorylated serine
SGPKPLFRRMSSLVGPTQ

SEQ ID NO: 2446 - protein, 8 aa, Artificial Sequence
  Description of Artificial Sequence: Synthetic peptide
  MOD_RES (4)..(4): phosphorylated serine
SIDSPQKL

SEQ ID NO: 2447 - protein, 8 aa, Artificial Sequence
  Description of Artificial Sequence: Synthetic peptide
  MOD_RES (4)..(4): phosphorylated serine
SIDSPQKY

SEQ ID NO: 2448 - protein, 9 aa, Artificial Sequence
  Description of Artificial Sequence: Synthetic peptide
  MOD_RES (4)..(4): phosphorylated serine
SILSFVSGL

SEQ ID NO: 2449 - protein, 9 aa, Artificial Sequence
  Description of Artificial Sequence: Synthetic peptide
  MOD_RES (4)..(4): phosphorylated serine
SIMSFHIDL

SEQ ID NO: 2450 - protein, 9 aa, Artificial Sequence
  Description of Artificial Sequence: Synthetic peptide
  MOD_RES (3)..(3): oxidized methionine
  MOD_RES (4)..(4): phosphorylated serine
SIMSPEIQL

SEQ ID NO: 2451 - protein, 9 aa, Artificial Sequence
  Description of Artificial Sequence: Synthetic peptide
  MOD_RES (4)..(4): phosphorylated serine
SIMSPEIQL

SEQ ID NO: 2452 - protein, 9 aa, Artificial Sequence
  Description of Artificial Sequence: Synthetic peptide
  MOD_RES (4)..(4): phosphorylated threonine
SIPTVSGQI

SEQ ID NO: 2453 - protein, 9 aa, Artificial Sequence
  Description of Artificial Sequence: Synthetic peptide
  MOD_RES (4)..(4): phosphorylated serine
SISSMEVNV

SEQ ID NO: 2454 - protein, 9 aa, Artificial Sequence
  Description of Artificial Sequence: Synthetic peptide
  MOD_RES (5)..(5): phosphorylated threonine
SISSTPPAV

SEQ ID NO: 2455 - protein, 22 aa, Artificial Sequence
  Description of Artificial Sequence: Synthetic peptide
  MOD_RES (21)..(21): phosphorylated serine
SKEDKNGHDGDTHQEDDGEKSD

SEQ ID NO: 2456 - protein, 8 aa, Artificial Sequence
  Description of Artificial Sequence: Synthetic peptide
  MOD_RES (5)..(5): phosphorylated tyrosine
SKRGYIGL

SEQ ID NO: 2457 - protein, 9 aa, Artificial Sequence
  Description of Artificial Sequence: Synthetic peptide
  MOD_RES (3)..(3): phosphorylated threonine
SKTVATFIL

SEQ ID NO: 2458 - protein, 9 aa, Artificial Sequence
  Description of Artificial Sequence: Synthetic peptide
  MOD_RES (4)..(4): phosphorylated serine
SLASLTEKI

SEQ ID NO: 2459 - protein, 9 aa, Artificial Sequence
  Description of Artificial Sequence: Synthetic peptide
  MOD_RES (8)..(8): phosphorylated serine
SLDSEDYSL

SEQ ID NO: 2460 - protein, 10 aa, Artificial Sequence
  Description of Artificial Sequence: Synthetic peptide
  MOD_RES (4)..(4): phosphorylated serine
SLDSLGDVFL

SEQ ID NO: 2461 - protein, 10 aa, Artificial Sequence
  Description of Artificial Sequence: Synthetic peptide
  MOD_RES (4)..(4): phosphorylated serine
SLDSPSYVLY

SEQ ID NO: 2462 - protein, 10 aa, Artificial Sequence
  Description of Artificial Sequence: Synthetic peptide
  MOD_RES (4)..(4): phosphorylated serine
SLESPSYVLY

SEQ ID NO: 2463 - protein, 9 aa, Artificial Sequence
  Description of Artificial Sequence: Synthetic peptide
  MOD_RES (6)..(6): phosphorylated serine
SLFGGSVKL

SEQ ID NO: 2464 - protein, 9 aa, Artificial Sequence
  Description of Artificial Sequence: Synthetic peptide
  MOD_RES (8)..(8): phosphorylated serine
SLFKRLYSL

SEQ ID NO: 2465 - protein, 10 aa, Artificial Sequence
  Description of Artificial Sequence: Synthetic peptide
  MOD_RES (4)..(4): phosphorylated serine
SLFSGDEENA

SEQ ID NO: 2466 - protein, 10 aa, Artificial Sequence
  Description of Artificial Sequence: Synthetic peptide
  MOD_RES (4)..(4): phosphorylated serine
SLFSGSYSSL

SEQ ID NO: 2467 - protein, 9 aa, Artificial Sequence
  Description of Artificial Sequence: Synthetic peptide
  MOD_RES (4)..(4): phosphorylated serine
SLFSPQNTL

SEQ ID NO: 2468 - protein, 9 aa, Artificial Sequence
  Description of Artificial Sequence: Synthetic peptide
  MOD_RES (4)..(4): phosphorylated serine
SLFSPRRNK

SEQ ID NO: 2469 - protein, 9 aa, Artificial Sequence
  Description of Artificial Sequence: Synthetic peptide
  MOD_RES (4)..(4): phosphorylated serine
SLFSPRRNY

SEQ ID NO: 2470 - protein, 10 aa, Artificial Sequence
  Description of Artificial Sequence: Synthetic peptide
  MOD_RES (4)..(4): phosphorylated serine
SLFSSEESNL

SEQ ID NO: 2471 - protein, 12 aa, Artificial Sequence
  Description of Artificial Sequence: Synthetic peptide
  MOD_RES (4)..(4): phosphorylated serine
SLFSSEESNLGA

SEQ ID NO: 2472 - protein, 9 aa, Artificial Sequence
  Description of Artificial Sequence: Synthetic peptide
  MOD_RES (8)..(8): phosphorylated serine
SLHDIQLSL

SEQ ID NO: 2473 - protein, 9 aa, Artificial Sequence
  Description of Artificial Sequence: Synthetic peptide
  MOD_RES (4)..(4): phosphorylated serine
SLKSPVTVK

SEQ ID NO: 2474 - protein, 11 aa, Artificial Sequence
  Description of Artificial Sequence: Synthetic peptide
  MOD_RES (5)..(5): phosphorylated serine
SLLASPGHISV

SEQ ID NO: 2475 - protein, 9 aa, Artificial Sequence
  Description of Artificial Sequence: Synthetic peptide
  MOD_RES (8)..(8): phosphorylated serine
SLLHTSRSL

SEQ ID NO: 2476 - protein, 10 aa, Artificial Sequence
  Description of Artificial Sequence: Synthetic peptide
  MOD_RES (7)..(7): phosphorylated serine
SLLNKSSPVK

SEQ ID NO: 2477 - protein, 11 aa, Artificial Sequence
  Description of Artificial Sequence: Synthetic peptide
  MOD_RES (7)..(7): phosphorylated serine
SLLNKSSPVKK

SEQ ID NO: 2478 - protein, 11 aa, Artificial Sequence
  Description of Artificial Sequence: Synthetic peptide
  MOD_RES (7)..(7): phosphorylated serine
SLLNKSSPVKY

SEQ ID NO: 2479 - protein, 9 aa, Artificial Sequence
  Description of Artificial Sequence: Synthetic peptide
  MOD_RES (4)..(4): phosphorylated serine
SLLSLHVDL

SEQ ID NO: 2480 - protein, 9 aa, Artificial Sequence
  Description of Artificial Sequence: Synthetic peptide
  MOD_RES (5)..(5): phosphorylated serine
SLLTSPPKA

SEQ ID NO: 2481 - protein, 9 aa, Artificial Sequence
  Description of Artificial Sequence: Synthetic peptide
  MOD_RES (5)..(5): phosphorylated serine
SLLTSPPKV

SEQ ID NO: 2482 - protein, 10 aa, Artificial Sequence
  Description of Artificial Sequence: Synthetic peptide
  MOD_RES (4)..(4): phosphorylated serine
SLMSGTLESL

SEQ ID NO: 2483 - protein, 9 aa, Artificial Sequence
  Description of Artificial Sequence: Synthetic peptide
  MOD_RES (4)..(4): phosphorylated serine
SLMSPGRRK

SEQ ID NO: 2484 - protein, 9 aa, Artificial Sequence
  Description of Artificial Sequence: Synthetic peptide
  MOD_RES (4)..(4): phosphorylated serine
SLMSPGRRY

SEQ ID NO: 2485 - protein, 9 aa, Artificial Sequence
  Description of Artificial Sequence: Synthetic peptide
  MOD_RES (8)..(8): phosphorylated serine
SLQPRSHSV

SEQ ID NO: 2486 - protein, 9 aa, Artificial Sequence
  Description of Artificial Sequence: Synthetic peptide
  MOD_RES (4)..(4): phosphorylated serine
SLQSLETSV

SEQ ID NO: 2487 - protein, 9 aa, Artificial Sequence
  Description of Artificial Sequence: Synthetic peptide
  MOD_RES (5)..(5): phosphorylated serine
SLRRSVLMK

SEQ ID NO: 2488 - protein, 9 aa, Artificial Sequence
  Description of Artificial Sequence: Synthetic peptide
  MOD_RES (5)..(5): phosphorylated serine
SLRRSVLMY

SEQ ID NO: 2489 - protein, 9 aa, Artificial Sequence
  Description of Artificial Sequence: Synthetic peptide
  MOD_RES (4)..(4): phosphorylated serine
SLSSLLVKL

SEQ ID NO: 2490 - protein, 9 aa, Artificial Sequence
  Description of Artificial Sequence: Synthetic peptide
  MOD_RES (3)..(3): phosphorylated threonine
SLTRSPPRV

SEQ ID NO: 2491 - protein, 9 aa, Artificial Sequence
  Description of Artificial Sequence: Synthetic peptide
  MOD_RES (5)..(5): phosphorylated serine
SLTRSPPRV

SEQ ID NO: 2492 - protein, 9 aa, Artificial Sequence
  Description of Artificial Sequence: Synthetic peptide
  MOD_RES (6)..(6): phosphorylated tyrosine
SLVDGYFRL

SEQ ID NO: 2493 - protein, 9 aa, Artificial Sequence
  Description of Artificial Sequence: Synthetic peptide
  MOD_RES (8)..(8): phosphorylated serine
SLYDRPASY

SEQ ID NO: 2494 - protein, 9 aa, Artificial Sequence
  Description of Artificial Sequence: Synthetic peptide
  MOD_RES (4)..(4): phosphorylated serine
SLYSPVKKK

SEQ ID NO: 2495 - protein, 9 aa, Artificial Sequence
  Description of Artificial Sequence: Synthetic peptide
  MOD_RES (4)..(4): phosphorylated serine
SMFSPRRNK

SEQ ID NO: 2496 - protein, 9 aa, Artificial Sequence
  Description of Artificial Sequence: Synthetic peptide
  MOD_RES (4)..(4): phosphorylated serine
SMKSPVTVK

SEQ ID NO: 2497 - protein, 10 aa, Artificial Sequence
  Description of Artificial Sequence: Synthetic peptide
  MOD_RES (7)..(7): phosphorylated serine
SMLNKSSPVK

SEQ ID NO: 2498 - protein, 11 aa, Artificial Sequence
  Description of Artificial Sequence: Synthetic peptide
  MOD_RES (7)..(7): phosphorylated serine
SMLNKSSPVKK

SEQ ID NO: 2499 - protein, 10 aa, Artificial Sequence
  Description of Artificial Sequence: Synthetic peptide
  MOD_RES (4)..(4): phosphorylated serine
SMLSQEIQTL

SEQ ID NO: 2500 - protein, 9 aa, Artificial Sequence
  Description of Artificial Sequence: Synthetic peptide
  MOD_RES (5)..(5): phosphorylated serine
SMLTSPPKA

SEQ ID NO: 2501 - protein, 9 aa, Artificial Sequence
  Description of Artificial Sequence: Synthetic peptide
  MOD_RES (5)..(5): phosphorylated serine
SMLTSPPKV

SEQ ID NO: 2502 - protein, 9 aa, Artificial Sequence
  Description of Artificial Sequence: Synthetic peptide
  MOD_RES (4)..(4): phosphorylated serine
SMMSPGRRK

SEQ ID NO: 2503 - protein, 9 aa, Artificial Sequence
  Description of Artificial Sequence: Synthetic peptide
  MOD_RES (8)..(8): phosphorylated serine
SMQPRSHSV

SEQ ID NO: 2504 - protein, 9 aa, Artificial Sequence
  Description of Artificial Sequence: Synthetic peptide
  MOD_RES (5)..(5): phosphorylated serine
SMRRSVLMK

SEQ ID NO: 2505 - protein, 9 aa, Artificial Sequence
  Description of Artificial Sequence: Synthetic peptide
  MOD_RES (4)..(4): phosphorylated serine
SMSSLSREV

SEQ ID NO: 2506 - protein, 9 aa, Artificial Sequence
  Description of Artificial Sequence: Synthetic peptide
  MOD_RES (3)..(3): phosphorylated threonine
SMTRSPPRV

SEQ ID NO: 2507 - protein, 9 aa, Artificial Sequence
  Description of Artificial Sequence: Synthetic peptide
  MOD_RES (5)..(5): phosphorylated serine
SMTRSPPRV

SEQ ID NO: 2508 - protein, 9 aa, Artificial Sequence
  Description of Artificial Sequence: Synthetic peptide
  MOD_RES (4)..(4): phosphorylated serine
SMYSPVKKK

SEQ ID NO: 2509 - protein, 11 aa, Artificial Sequence
  Description of Artificial Sequence: Synthetic peptide
  MOD_RES (5)..(5): phosphorylated serine
SNFKSPVKTIR

SEQ ID NO: 2510 - protein, 18 aa, Artificial Sequence
  Description of Artificial Sequence: Synthetic peptide
  MOD_RES (10)..(10): phosphorylated serine
SPAASISRLSGEQVDGKG

SEQ ID NO: 2511 - protein, 9 aa, Artificial Sequence
  Description of Artificial Sequence: Synthetic peptide
  MOD_RES (4)..(4): phosphorylated serine
SPASPKISF

SEQ ID NO: 2512 - protein, 9 aa, Artificial Sequence
  Description of Artificial Sequence: Synthetic peptide
  MOD_RES (4)..(4): phosphorylated serine
SPASPKISL

SEQ ID NO: 2513 - protein, 9 aa, Artificial Sequence
  Description of Artificial Sequence: Synthetic peptide
  MOD_RES (4)..(4): phosphorylated serine
SPASPKISM

SEQ ID NO: 2514 - protein, 9 aa, Artificial Sequence
  Description of Artificial Sequence: Synthetic peptide
  MOD_RES (4)..(4): phosphorylated serine
SPASPKISV

SEQ ID NO: 2515 - protein, 9 aa, Artificial Sequence
  Description of Artificial Sequence: Synthetic peptide
  MOD_RES (4)..(4): phosphorylated serine
SPDSSQSSL

SEQ ID NO: 2516 - protein, 17 aa, Artificial Sequence
  Description of Artificial Sequence: Synthetic peptide
  MOD_RES (1)..(1): phosphorylated serine
SPEDEYELLMPHRISSH

SEQ ID NO: 2517 - protein, 17 aa, Artificial Sequence
  Description of Artificial Sequence: Synthetic peptide
  MOD_RES (15)..(15): phosphorylated serine
SPEDEYELLMPHRISSH

SEQ ID NO: 2518 - protein, 11 aa, Artificial Sequence
  Description of Artificial Sequence: Synthetic peptide
  MOD_RES (9)..(9): phosphorylated serine
SPEKAGRRSSF

SEQ ID NO: 2519 - protein, 11 aa, Artificial Sequence
  Description of Artificial Sequence: Synthetic peptide
  MOD_RES (9)..(9): phosphorylated serine
SPEKAGRRSSL

SEQ ID NO: 2520 - protein, 11 aa, Artificial Sequence
  Description of Artificial Sequence: Synthetic peptide
  MOD_RES (9)..(9): phosphorylated serine
SPEKAGRRSSM

SEQ ID NO: 2521 - protein, 11 aa, Artificial Sequence
  Description of Artificial Sequence: Synthetic peptide
  MOD_RES (9)..(9): phosphorylated serine
SPEKAGRRSSV

SEQ ID NO: 2522 - protein, 18 aa, Artificial Sequence
  Description of Artificial Sequence: Synthetic peptide
  MOD_RES (1)..(1): phosphorylated serine
SPERPFLAILGGAKVADK

SEQ ID NO: 2523 - protein, 20 aa, Artificial Sequence
  Description of Artificial Sequence: Synthetic peptide
  MOD_RES (1)..(1): phosphorylated serine
SPERPFLAILGGAKVADKIQ

SEQ ID NO: 2524 - protein, 9 aa, Artificial Sequence
  Description of Artificial Sequence: Synthetic peptide
  MOD_RES (8)..(8): phosphorylated serine
SPFKRQLSF

SEQ ID NO: 2525 - protein, 9 aa, Artificial Sequence
  Description of Artificial Sequence: Synthetic peptide
  MOD_RES (8)..(8): phosphorylated serine
SPFKRQLSL

SEQ ID NO: 2526 - protein, 9 aa, Artificial Sequence
  Description of Artificial Sequence: Synthetic peptide
  MOD_RES (8)..(8): phosphorylated serine
SPFKRQLSM

SEQ ID NO: 2527 - protein, 9 aa, Artificial Sequence
  Description of Artificial Sequence: Synthetic peptide
  MOD_RES (8)..(8): phosphorylated serine
SPFKRQLSV

SEQ ID NO: 2528 - protein, 9 aa, Artificial Sequence
  Description of Artificial Sequence: Synthetic peptide
  MOD_RES (5)..(5): phosphorylated serine
SPFLSKRSL

SEQ ID NO: 2529 - protein, 10 aa, Artificial Sequence
  Description of Artificial Sequence: Synthetic peptide
  MOD_RES (9)..(9): phosphorylated serine
SPGLARKRSF

SEQ ID NO: 2530 - protein, 10 aa, Artificial Sequence
  Description of Artificial Sequence: Synthetic peptide
  MOD_RES (9)..(9): phosphorylated serine
SPGLARKRSL

SEQ ID NO: 2531 - protein, 10 aa, Artificial Sequence
  Description of Artificial Sequence: Synthetic peptide
  MOD_RES (9)..(9): phosphorylated serine
SPGLARKRSM

SEQ ID NO: 2532 - protein, 10 aa, Artificial Sequence
  Description of Artificial Sequence: Synthetic peptide
  MOD_RES (9)..(9): phosphorylated serine
SPGLARKRSV

SEQ ID NO: 2533 - protein, 9 aa, Artificial Sequence
  Description of Artificial Sequence: Synthetic peptide
  MOD_RES (4)..(4): phosphorylated serine
SPGSPRPAF

SEQ ID NO: 2534 - protein, 9 aa, Artificial Sequence
  Description of Artificial Sequence: Synthetic peptide
  MOD_RES (4)..(4): phosphorylated serine
SPGSPRPAL

SEQ ID NO: 2535 - protein, 9 aa, Artificial Sequence
  Description of Artificial Sequence: Synthetic peptide
  MOD_RES (4)..(4): phosphorylated serine
SPGSPRPAM

SEQ ID NO: 2536 - protein, 9 aa, Artificial Sequence
  Description of Artificial Sequence: Synthetic peptide
  MOD_RES (4)..(4): phosphorylated serine
SPGSPRPAV

SEQ ID NO: 2537 - protein, 9 aa, Artificial Sequence
  Description of Artificial Sequence: Synthetic peptide
  MOD_RES (4)..(4): phosphorylated serine
SPKSPGLKA

SEQ ID NO: 2538 - protein, 9 aa, Artificial Sequence
  Description of Artificial Sequence: Synthetic peptide
  MOD_RES (4)..(4): phosphorylated serine
SPKSPGLKF

SEQ ID NO: 2539 - protein, 9 aa, Artificial Sequence
  Description of Artificial Sequence: Synthetic peptide
  MOD_RES (4)..(4): phosphorylated serine
SPKSPGLKL

SEQ ID NO: 2540 - protein, 9 aa, Artificial Sequence
  Description of Artificial Sequence: Synthetic peptide
  MOD_RES (4)..(4): phosphorylated serine
SPKSPGLKM

SEQ ID NO: 2541 - protein, 9 aa, Artificial Sequence
  Description of Artificial Sequence: Synthetic peptide
  MOD_RES (4)..(4): phosphorylated serine
SPKSPGLKV

SEQ ID NO: 2542 - protein, 9 aa, Artificial Sequence
  Description of Artificial Sequence: Synthetic peptide
  MOD_RES (4)..(4): phosphorylated serine
SPKSPTAAF

SEQ ID NO: 2543 - protein, 9 aa, Artificial Sequence
  Description of Artificial Sequence: Synthetic peptide
  MOD_RES (4)..(4): phosphorylated serine
SPKSPTAAL

SEQ ID NO: 2544 - protein, 9 aa, Artificial Sequence
  Description of Artificial Sequence: Synthetic peptide
  MOD_RES (4)..(4): phosphorylated serine
SPKSPTAAM

SEQ ID NO: 2545 - protein, 9 aa, Artificial Sequence
  Description of Artificial Sequence: Synthetic peptide
  MOD_RES (4)..(4): phosphorylated serine
SPKSPTAAV

SEQ ID NO: 2546 - protein, 9 aa, Artificial Sequence
  Description of Artificial Sequence: Synthetic peptide
  MOD_RES (8)..(8): phosphorylated serine
SPLTKSISL

SEQ ID NO: 2547 - protein, 19 aa, Artificial Sequence
  Description of Artificial Sequence: Synthetic peptide
  MOD_RES (1)..(1): phosphorylated serine
SPPFPVPVYTRQAPKQVIK

SEQ ID NO: 2548 - protein, 11 aa, Artificial Sequence
  Description of Artificial Sequence: Synthetic peptide
  MOD_RES (7)..(7): phosphorylated serine
SPRAPVSPLKF

SEQ ID NO: 2549 - protein, 9 aa, Artificial Sequence
  Description of Artificial Sequence: Synthetic peptide
  MOD_RES (6)..(6): phosphorylated serine
SPRERSPAL

SEQ ID NO: 2550 - protein, 9 aa, Artificial Sequence
  Description of Artificial Sequence: Synthetic peptide
  MOD_RES (7)..(7): phosphorylated serine
SPRGEASSL

SEQ ID NO: 2551 - protein, 9 aa, Artificial Sequence
  Description of Artificial Sequence: Synthetic peptide
  MOD_RES (8)..(8): phosphorylated serine
SPRGEASSL

SEQ ID NO: 2552 - protein, 10 aa, Artificial Sequence
  Description of Artificial Sequence: Synthetic peptide
  MOD_RES (7)..(7): phosphorylated serine
SPRPPNSPSI

SEQ ID NO: 2553 - protein, 10 aa, Artificial Sequence
  Description of Artificial Sequence: Synthetic peptide
  MOD_RES (5)..(5): phosphorylated serine
SPRRSLGLAL

SEQ ID NO: 2554 - protein, 10 aa, Artificial Sequence
  Description of Artificial Sequence: Synthetic peptide
  MOD_RES (5)..(5): phosphorylated serine
  MOD_RES (9)..(9): phosphorylated serine
SPRRSRSISF

SEQ ID NO: 2555 - protein, 10 aa, Artificial Sequence
  Description of Artificial Sequence: Synthetic peptide
  MOD_RES (5)..(5): phosphorylated serine
SPRRSRSISF

SEQ ID NO: 2556 - protein, 10 aa, Artificial Sequence
  Description of Artificial Sequence: Synthetic peptide
  MOD_RES (5)..(5): phosphorylated serine
  MOD_RES (9)..(9): phosphorylated serine
SPRRSRSISL

SEQ ID NO: 2557 - protein, 10 aa, Artificial Sequence
  Description of Artificial Sequence: Synthetic peptide
  MOD_RES (5)..(5): phosphorylated serine
SPRRSRSISL

SEQ ID NO: 2558 - protein, 10 aa, Artificial Sequence
  Description of Artificial Sequence: Synthetic peptide
  MOD_RES (5)..(5): phosphorylated serine
  MOD_RES (9)..(9): phosphorylated serine
SPRRSRSISM

SEQ ID NO: 2559 - protein, 10 aa, Artificial Sequence
  Description of Artificial Sequence: Synthetic peptide
  MOD_RES (5)..(5): phosphorylated serine
SPRRSRSISM

SEQ ID NO: 2560 - protein, 10 aa, Artificial Sequence
  Description of Artificial Sequence: Synthetic peptide
  MOD_RES (5)..(5): phosphorylated serine
  MOD_RES (9)..(9): phosphorylated serine
SPRRSRSISV

SEQ ID NO: 2561 - protein, 10 aa, Artificial Sequence
  Description of Artificial Sequence: Synthetic peptide
  MOD_RES (5)..(5): phosphorylated serine
SPRRSRSISV

SEQ ID NO: 2562 - protein, 9 aa, Artificial Sequence
  Description of Artificial Sequence: Synthetic peptide
  MOD_RES (4)..(4): phosphorylated serine
SPRSITSTF

SEQ ID NO: 2563 - protein, 9 aa, Artificial Sequence
  Description of Artificial Sequence: Synthetic peptide
  MOD_RES (4)..(4): phosphorylated serine
SPRSITSTL

SEQ ID NO: 2564 - protein, 9 aa, Artificial Sequence
  Description of Artificial Sequence: Synthetic peptide
  MOD_RES (4)..(4): phosphorylated serine
SPRSITSTM

SEQ ID NO: 2565 - protein, 9 aa, Artificial Sequence
  Description of Artificial Sequence: Synthetic peptide
  MOD_RES (4)..(4): phosphorylated serine
SPRSITSTP

SEQ ID NO: 2566 - protein, 9 aa, Artificial Sequence
  Description of Artificial Sequence: Synthetic peptide
  MOD_RES (4)..(4): phosphorylated serine
SPRSITSTV

SEQ ID NO: 2567 - protein, 9 aa, Artificial Sequence
  Description of Artificial Sequence: Synthetic peptide
  MOD_RES (4)..(4): phosphorylated serine
SPRSPDRTL

SEQ ID NO: 2568 - protein, 9 aa, Artificial Sequence
  Description of Artificial Sequence: Synthetic peptide
  MOD_RES (4)..(4): phosphorylated serine
SPRSPGKPF

SEQ ID NO: 2569 - protein, 9 aa, Artificial Sequence
  Description of Artificial Sequence: Synthetic peptide
  MOD_RES (4)..(4): phosphorylated serine
SPRSPGKPL

SEQ ID NO: 2570 - protein, 9 aa, Artificial Sequence
  Description of Artificial Sequence: Synthetic peptide
  MOD_RES (4)..(4): phosphorylated serine
SPRSPGKPM

SEQ ID NO: 2571 - protein, 9 aa, Artificial Sequence
  Description of Artificial Sequence: Synthetic peptide
  MOD_RES (4)..(4): phosphorylated serine
SPRSPGKPV

SEQ ID NO: 2572 - protein, 9 aa, Artificial Sequence
  Description of Artificial Sequence: Synthetic peptide
  MOD_RES (4)..(4): phosphorylated serine
SPRSPGRSF

SEQ ID NO: 2573 - protein, 9 aa, Artificial Sequence
  Description of Artificial Sequence: Synthetic peptide
  MOD_RES (4)..(4): phosphorylated serine
SPRSPGRSI

SEQ ID NO: 2574 - protein, 9 aa, Artificial Sequence
  Description of Artificial Sequence: Synthetic peptide
  MOD_RES (4)..(4): phosphorylated serine
SPRSPGRSL

SEQ ID NO: 2575 - protein, 9 aa, Artificial Sequence
  Description of Artificial Sequence: Synthetic peptide
  MOD_RES (4)..(4): phosphorylated serine
SPRSPGRSM

SEQ ID NO: 2576 - protein, 9 aa, Artificial Sequence
  Description of Artificial Sequence: Synthetic peptide
  MOD_RES (4)..(4): phosphorylated serine
SPRSPGRSV

SEQ ID NO: 2577 - protein, 9 aa, Artificial Sequence
  Description of Artificial Sequence: Synthetic peptide
  MOD_RES (4)..(4): phosphorylated serine
  MOD_RES (9)..(9): Any amino acid
SPRSPGRSX

SEQ ID NO: 2578 - protein, 9 aa, Artificial Sequence
  Description of Artificial Sequence: Synthetic peptide
  MOD_RES (4)..(4): phosphorylated serine
SPRSPSGLR

SEQ ID NO: 2579 - protein, 10 aa, Artificial Sequence
  Description of Artificial Sequence: Synthetic peptide
  MOD_RES (4)..(4): phosphorylated serine
SPRSPSTTYF

SEQ ID NO: 2580 - protein, 10 aa, Artificial Sequence
  Description of Artificial Sequence: Synthetic peptide
  MOD_RES (4)..(4): phosphorylated serine
SPRSPSTTYL

SEQ ID NO: 2581 - protein, 10 aa, Artificial Sequence
  Description of Artificial Sequence: Synthetic peptide
  MOD_RES (6)..(6): phosphorylated serine
SPRSPSTTYL

SEQ ID NO: 2582 - protein, 10 aa, Artificial Sequence
  Description of Artificial Sequence: Synthetic peptide
  MOD_RES (4)..(4): phosphorylated serine
SPRSPSTTYM

SEQ ID NO: 2583 - protein, 10 aa, Artificial Sequence
  Description of Artificial Sequence: Synthetic peptide
  MOD_RES (4)..(4): phosphorylated serine
SPRSPSTTYV

SEQ ID NO: 2584 - protein, 8 aa, Artificial Sequence
  Description of Artificial Sequence: Synthetic peptide
  MOD_RES (4)..(4): phosphorylated serine
  MOD_RES (5)..(5): phosphorylated serine
SPRSSQLV

SEQ ID NO: 2585 - protein, 11 aa, Artificial Sequence
  Description of Artificial Sequence: Synthetic peptide
  MOD_RES (4)..(4): phosphorylated threonine
  MOD_RES (7)..(7): phosphorylated serine
SPRTPVSPVKF

SEQ ID NO: 2586 - protein, 11 aa, Artificial Sequence
  Description of Artificial Sequence: Synthetic peptide
  MOD_RES (7)..(7): phosphorylated serine
SPRTPVSPVKF

SEQ ID NO: 2587 - protein, 11 aa, Artificial Sequence
  Description of Artificial Sequence: Synthetic peptide
  MOD_RES (4)..(4): phosphorylated threonine
  MOD_RES (7)..(7): phosphorylated serine
SPRTPVSPVKL

SEQ ID NO: 2588 - protein, 11 aa, Artificial Sequence
  Description of Artificial Sequence: Synthetic peptide
  MOD_RES (7)..(7): phosphorylated serine
SPRTPVSPVKL

SEQ ID NO: 2589 - protein, 11 aa, Artificial Sequence
  Description of Artificial Sequence: Synthetic peptide
  MOD_RES (4)..(4): phosphorylated threonine
  MOD_RES (7)..(7): phosphorylated serine
SPRTPVSPVKM

SEQ ID NO: 2590 - protein, 11 aa, Artificial Sequence
  Description of Artificial Sequence: Synthetic peptide
  MOD_RES (7)..(7): phosphorylated serine
SPRTPVSPVKM

SEQ ID NO: 2591 - protein, 11 aa, Artificial Sequence
  Description of Artificial Sequence: Synthetic peptide
  MOD_RES (4)..(4): phosphorylated threonine
  MOD_RES (7)..(7): phosphorylated serine
SPRTPVSPVKV

SEQ ID NO: 2592 - protein, 11 aa, Artificial Sequence
  Description of Artificial Sequence: Synthetic peptide
  MOD_RES (7)..(7): phosphorylated serine
SPRTPVSPVKV

SEQ ID NO: 2593 - protein, 11 aa, Artificial Sequence
  Description of Artificial Sequence: Synthetic peptide
  MOD_RES (4)..(4): phosphorylated serine
SPSSPSVRRQF

SEQ ID NO: 2594 - protein, 11 aa, Artificial Sequence
  Description of Artificial Sequence: Synthetic peptide
  MOD_RES (4)..(4): phosphorylated serine
SPSSPSVRRQL

SEQ ID NO: 2595 - protein, 11 aa, Artificial Sequence
  Description of Artificial Sequence: Synthetic peptide
  MOD_RES (4)..(4): phosphorylated serine
SPSSPSVRRQM

SEQ ID NO: 2596 - protein, 11 aa, Artificial Sequence
  Description of Artificial Sequence: Synthetic peptide
  MOD_RES (4)..(4): phosphorylated serine
SPSSPSVRRQV

SEQ ID NO: 2597 - protein, 13 aa, Artificial Sequence
  Description of Artificial Sequence: Synthetic peptide
  MOD_RES (10)..(10): phosphorylated serine
SPSTSRSGGSSRF

SEQ ID NO: 2598 - protein, 13 aa, Artificial Sequence
  Description of Artificial Sequence: Synthetic peptide
  MOD_RES (10)..(10): phosphorylated serine
SPSTSRSGGSSRL

SEQ ID NO: 2599 - protein, 13 aa, Artificial Sequence
  Description of Artificial Sequence: Synthetic peptide
  MOD_RES (10)..(10): phosphorylated serine
SPSTSRSGGSSRM

SEQ ID NO: 2600 - protein, 13 aa, Artificial Sequence
  Description of Artificial Sequence: Synthetic peptide
  MOD_RES (10)..(10): phosphorylated serine
SPSTSRSGGSSRV

SEQ ID NO: 2601 - protein, 13 aa, Artificial Sequence
  Description of Artificial Sequence: Synthetic peptide
  MOD_RES (1)..(1): phosphorylated serine
SPTRPNPPVRNLH

SEQ ID NO: 2602 - protein, 9 aa, Artificial Sequence
  Description of Artificial Sequence: Synthetic peptide
  MOD_RES (4)..(4): phosphorylated serine
SPVSPMKEL

SEQ ID NO: 2603 - protein, 10 aa, Artificial Sequence
  Description of Artificial Sequence: Synthetic peptide
  MOD_RES (4)..(4): phosphorylated serine
SPVSTRPLEP

SEQ ID NO: 2604 - protein, 10 aa, Artificial Sequence
  Description of Artificial Sequence: Synthetic peptide
  MOD_RES (5)..(5): phosphorylated threonine
SPVSTRPLEP

SEQ ID NO: 2605 - protein, 8 aa, Artificial Sequence
  Description of Artificial Sequence: Synthetic peptide
  MOD_RES (7)..(7): phosphorylated serine
SPVVHQSF

SEQ ID NO: 2606 - protein, 8 aa, Artificial Sequence
  Description of Artificial Sequence: Synthetic peptide
  MOD_RES (7)..(7): phosphorylated serine
SPVVHQSL

SEQ ID NO: 2607 - protein, 8 aa, Artificial Sequence
  Description of Artificial Sequence: Synthetic peptide
  MOD_RES (7)..(7): phosphorylated serine
SPVVHQSM

SEQ ID NO: 2608 - protein, 8 aa, Artificial Sequence
  Description of Artificial Sequence: Synthetic peptide
  MOD_RES (7)..(7): phosphorylated serine
SPVVHQSV

SEQ ID NO: 2609 - protein, 10 aa, Artificial Sequence
  Description of Artificial Sequence: Synthetic peptide
  MOD_RES (4)..(4): phosphorylated serine
SQISPKSWGV

SEQ ID NO: 2610 - protein, 8 aa, Artificial Sequence
  Description of Artificial Sequence: Synthetic peptide
  MOD_RES (6)..(6): phosphorylated serine
SRDKHSEY

SEQ ID NO: 2611 - protein, 8 aa, Artificial Sequence
  Description of Artificial Sequence: Synthetic peptide
  MOD_RES (6)..(6): phosphorylated serine
SREKHSEI

SEQ ID NO: 2612 - protein, 8 aa, Artificial Sequence
  Description of Artificial Sequence: Synthetic peptide
  MOD_RES (6)..(6): phosphorylated serine
SREKHSEL

SEQ ID NO: 2613 - protein, 9 aa, Artificial Sequence
  Description of Artificial Sequence: Synthetic peptide
  MOD_RES (8)..(8): phosphorylated serine
SRFNRRVSV

SEQ ID NO: 2614 - protein, 8 aa, Artificial Sequence
  Description of Artificial Sequence: Synthetic peptide
  MOD_RES (7)..(7): phosphorylated serine
SRLTHLSF

SEQ ID NO: 2615 - protein, 8 aa, Artificial Sequence
  Description of Artificial Sequence: Synthetic peptide
  MOD_RES (7)..(7): phosphorylated serine
SRLTHLSK

SEQ ID NO: 2616 - protein, 8 aa, Artificial Sequence
  Description of Artificial Sequence: Synthetic peptide
  MOD_RES (7)..(7): phosphorylated serine
SRLTHLSL

SEQ ID NO: 2617 - protein, 8 aa, Artificial Sequence
  Description of Artificial Sequence: Synthetic peptide
  MOD_RES (7)..(7): phosphorylated serine
SRLTHLSM

SEQ ID NO: 2618 - protein, 8 aa, Artificial Sequence
  Description of Artificial Sequence: Synthetic peptide
  MOD_RES (7)..(7): phosphorylated serine
SRLTHLSR

SEQ ID NO: 2619 - protein, 8 aa, Artificial Sequence
  Description of Artificial Sequence: Synthetic peptide
  MOD_RES (7)..(7): phosphorylated serine
SRLTHLSY

SEQ ID NO: 2620 - protein, 9 aa, Artificial Sequence
  Description of Artificial Sequence: Synthetic peptide
  MOD_RES (4)..(4): phosphorylated serine
SRMSPKAQF

SEQ ID NO: 2621 - protein, 9 aa, Artificial Sequence
  Description of Artificial Sequence: Synthetic peptide
  MOD_RES (4)..(4): phosphorylated serine
SRMSPKAQK

SEQ ID NO: 2622 - protein, 9 aa, Artificial Sequence
  Description of Artificial Sequence: Synthetic peptide
  MOD_RES (4)..(4): phosphorylated serine
SRMSPKAQL

SEQ ID NO: 2623 - protein, 9 aa, Artificial Sequence
  Description of Artificial Sequence: Synthetic peptide
  MOD_RES (4)..(4): phosphorylated serine
SRMSPKAQM

SEQ ID NO: 2624 - protein, 9 aa, Artificial Sequence
  Description of Artificial Sequence: Synthetic peptide
  MOD_RES (4)..(4): phosphorylated serine
SRMSPKAQR

SEQ ID NO: 2625 - protein, 9 aa, Artificial Sequence
  Description of Artificial Sequence: Synthetic peptide
  MOD_RES (4)..(4): phosphorylated serine
SRMSPKAQY

SEQ ID NO: 2626 - protein, 10 aa, Artificial Sequence
  Description of Artificial Sequence: Synthetic peptide
  MOD_RES (3)..(3): phosphorylated serine
SRSSRSPYSR

SEQ ID NO: 2627 - protein, 9 aa, Artificial Sequence
  Description of Artificial Sequence: Synthetic peptide
  MOD_RES (4)..(4): phosphorylated serine
  MOD_RES (8)..(8): phosphorylated serine
SRSSSVLSL

SEQ ID NO: 2628 - protein, 9 aa, Artificial Sequence
  Description of Artificial Sequence: Synthetic peptide
  MOD_RES (5)..(5): phosphorylated serine
SRSSSVLSL

SEQ ID NO: 2629 - protein, 9 aa, Artificial Sequence
  Description of Artificial Sequence: Synthetic peptide
  MOD_RES (8)..(8): phosphorylated serine
SRSSSVLSL

SEQ ID NO: 2630 - protein, 9 aa, Artificial Sequence
  Description of Artificial Sequence: Synthetic peptide
  MOD_RES (4)..(4): phosphorylated serine
SRTSPITRF

SEQ ID NO: 2631 - protein, 9 aa, Artificial Sequence
  Description of Artificial Sequence: Synthetic peptide
  MOD_RES (4)..(4): phosphorylated serine
SRTSPITRK

SEQ ID NO: 2632 - protein, 9 aa, Artificial Sequence
  Description of Artificial Sequence: Synthetic peptide
  MOD_RES (4)..(4): phosphorylated serine
SRTSPITRL

SEQ ID NO: 2633 - protein, 9 aa, Artificial Sequence
  Description of Artificial Sequence: Synthetic peptide
  MOD_RES (4)..(4): phosphorylated serine
SRTSPITRM

SEQ ID NO: 2634 - protein, 9 aa, Artificial Sequence
  Description of Artificial Sequence: Synthetic peptide
  MOD_RES (4)..(4): phosphorylated serine
SRTSPITRR

SEQ ID NO: 2635 - protein, 9 aa, Artificial Sequence
  Description of Artificial Sequence: Synthetic peptide
  MOD_RES (4)..(4): phosphorylated serine
SRTSPITRY

SEQ ID NO: 2636 - protein, 9 aa, Artificial Sequence
  Description of Artificial Sequence: Synthetic peptide
  MOD_RES (4)..(4): phosphorylated serine
SRWSGSHQF

SEQ ID NO: 2637 - protein, 9 aa, Artificial Sequence
  Description of Artificial Sequence: Synthetic peptide
  MOD_RES (4)..(4): phosphorylated serine
SRWSGSHQK

SEQ ID NO: 2638 - protein, 9 aa, Artificial Sequence
  Description of Artificial Sequence: Synthetic peptide
  MOD_RES (4)..(4): phosphorylated serine
SRWSGSHQR

SEQ ID NO: 2639 - protein, 9 aa, Artificial Sequence
  Description of Artificial Sequence: Synthetic peptide
  MOD_RES (4)..(4): phosphorylated serine
SRWSGSHQY

SEQ ID NO: 2640 - protein, 10 aa, Artificial Sequence
  Description of Artificial Sequence: Synthetic peptide
  MOD_RES (4)..(4): phosphorylated serine
  MOD_RES (6)..(6): phosphorylated serine
SRYSRSPYSF

SEQ ID NO: 2641 - protein, 10 aa, Artificial Sequence
  Description of Artificial Sequence: Synthetic peptide
  MOD_RES (4)..(4): phosphorylated serine
SRYSRSPYSF

SEQ ID NO: 2642 - protein, 10 aa, Artificial Sequence
  Description of Artificial Sequence: Synthetic peptide
  MOD_RES (6)..(6): phosphorylated serine
SRYSRSPYSF

SEQ ID NO: 2643 - protein, 10 aa, Artificial Sequence
  Description of Artificial Sequence: Synthetic peptide
  MOD_RES (4)..(4): phosphorylated serine
  MOD_RES (6)..(6): phosphorylated serine
SRYSRSPYSK

SEQ ID NO: 2644 - protein, 10 aa, Artificial Sequence
  Description of Artificial Sequence: Synthetic peptide
  MOD_RES (4)..(4): phosphorylated serine
SRYSRSPYSK

SEQ ID NO: 2645 - protein, 10 aa, Artificial Sequence
  Description of Artificial Sequence: Synthetic peptide
  MOD_RES (6)..(6): phosphorylated serine
SRYSRSPYSK

SEQ ID NO: 2646 - protein, 10 aa, Artificial Sequence
  Description of Artificial Sequence: Synthetic peptide
  MOD_RES (4)..(4): phosphorylated serine
  MOD_RES (6)..(6): phosphorylated serine
SRYSRSPYSL

SEQ ID NO: 2647 - protein, 10 aa, Artificial Sequence
  Description of Artificial Sequence: Synthetic peptide
  MOD_RES (4)..(4): phosphorylated serine
SRYSRSPYSL

SEQ ID NO: 2648 - protein, 10 aa, Artificial Sequence
  Description of Artificial Sequence: Synthetic peptide
  MOD_RES (6)..(6): phosphorylated serine
SRYSRSPYSL

SEQ ID NO: 2649 - protein, 10 aa, Artificial Sequence
  Description of Artificial Sequence: Synthetic peptide
  MOD_RES (4)..(4): phosphorylated serine
  MOD_RES (6)..(6): phosphorylated serine
SRYSRSPYSM

SEQ ID NO: 2650 - protein, 10 aa, Artificial Sequence
  Description of Artificial Sequence: Synthetic peptide
  MOD_RES (4)..(4): phosphorylated serine
SRYSRSPYSM

SEQ ID NO: 2651 - protein, 10 aa, Artificial Sequence
  Description of Artificial Sequence: Synthetic peptide
  MOD_RES (6)..(6): phosphorylated serine
SRYSRSPYSM

SEQ ID NO: 2652 - protein, 10 aa, Artificial Sequence
  Description of Artificial Sequence: Synthetic peptide
  MOD_RES (4)..(4): phosphorylated serine
  MOD_RES (6)..(6): phosphorylated serine
SRYSRSPYSR

SEQ ID NO: 2653 - protein, 10 aa, Artificial Sequence
  Description of Artificial Sequence: Synthetic peptide
  MOD_RES (4)..(4): phosphorylated serine
SRYSRSPYSR

SEQ ID NO: 2654 - protein, 10 aa, Artificial Sequence
  Description of Artificial Sequence: Synthetic peptide
  MOD_RES (6)..(6): phosphorylated serine
SRYSRSPYSR

SEQ ID NO: 2655 - protein, 10 aa, Artificial Sequence
  Description of Artificial Sequence: Synthetic peptide
  MOD_RES (4)..(4): phosphorylated serine
  MOD_RES (6)..(6): phosphorylated serine
SRYSRSPYSY

SEQ ID NO: 2656 - protein, 10 aa, Artificial Sequence
  Description of Artificial Sequence: Synthetic peptide
  MOD_RES (4)..(4): phosphorylated serine
SRYSRSPYSY

SEQ ID NO: 2657 - protein, 10 aa, Artificial Sequence
  Description of Artificial Sequence: Synthetic peptide
  MOD_RES (6)..(6): phosphorylated serine
SRYSRSPYSY

SEQ ID NO: 2658 - protein, 11 aa, Artificial Sequence
  Description of Artificial Sequence: Synthetic peptide
  MOD_RES (4)..(4): phosphorylated serine
  MOD_RES (6)..(6): phosphorylated threonine
  MOD_RES (7)..(7): phosphorylated serine
SRYSRTSPYSR

SEQ ID NO: 2659 - protein, 9 aa, Artificial Sequence
  Description of Artificial Sequence: Synthetic peptide
  MOD_RES (5)..(5): phosphorylated serine
SSDISPTRL

SEQ ID NO: 2660 - protein, 9 aa, Artificial Sequence
  Description of Artificial Sequence: Synthetic peptide
  MOD_RES (5)..(5): phosphorylated serine
SSDISPTRY

SEQ ID NO: 2661 - protein, 8 aa, Artificial Sequence
  Description of Artificial Sequence: Synthetic peptide
  MOD_RES (6)..(6): phosphorylated serine
SSDKHSEY

SEQ ID NO: 2662 - protein, 10 aa, Artificial Sequence
  Description of Artificial Sequence: Synthetic peptide
  MOD_RES (9)..(9): phosphorylated serine
SSDPASQLSY

SEQ ID NO: 2663 - protein, 9 aa, Artificial Sequence
  Description of Artificial Sequence: Synthetic peptide
  MOD_RES (4)..(4): phosphorylated serine
SSDSETLRY

SEQ ID NO: 2664 - protein, 8 aa, Artificial Sequence
  Description of Artificial Sequence: Synthetic peptide
  MOD_RES (4)..(4): phosphorylated serine
SSDSPQKL

SEQ ID NO: 2665 - protein, 8 aa, Artificial Sequence
  Description of Artificial Sequence: Synthetic peptide
  MOD_RES (4)..(4): phosphorylated serine
SSDSPQKY

SEQ ID NO: 2666 - protein, 10 aa, Artificial Sequence
  Description of Artificial Sequence: Synthetic peptide
  MOD_RES (4)..(4): phosphorylated serine
SSDSPSYVLY

SEQ ID NO: 2667 - protein, 10 aa, Artificial Sequence
  Description of Artificial Sequence: Synthetic peptide
  MOD_RES (4)..(4): phosphorylated serine
SSDSPTNHFF

SEQ ID NO: 2668 - protein, 9 aa, Artificial Sequence
  Description of Artificial Sequence: Synthetic peptide
  MOD_RES (5)..(5): phosphorylated serine
SSEISPTRY

SEQ ID NO: 2669 - protein, 8 aa, Artificial Sequence
  Description of Artificial Sequence: Synthetic peptide
  MOD_RES (6)..(6): phosphorylated serine
SSEKHSEY

SEQ ID NO: 2670 - protein, 10 aa, Artificial Sequence
  Description of Artificial Sequence: Synthetic peptide
  MOD_RES (9)..(9): phosphorylated serine
SSEPASQLSY

SEQ ID NO: 2671 - protein, 9 aa, Artificial Sequence
  Description of Artificial Sequence: Synthetic peptide
  MOD_RES (4)..(4): phosphorylated serine
SSESETLRY

SEQ ID NO: 2672 - protein, 8 aa, Artificial Sequence
  Description of Artificial Sequence: Synthetic peptide
  MOD_RES (4)..(4): phosphorylated serine
SSESPQKL

SEQ ID NO: 2673 - protein, 8 aa, Artificial Sequence
  Description of Artificial Sequence: Synthetic peptide
  MOD_RES (4)..(4): phosphorylated serine
SSESPQKY

SEQ ID NO: 2674 - protein, 10 aa, Artificial Sequence
  Description of Artificial Sequence: Synthetic peptide
  MOD_RES (4)..(4): phosphorylated serine
SSESPSYVLY

SEQ ID NO: 2675 - protein, 10 aa, Artificial Sequence
  Description of Artificial Sequence: Synthetic peptide
  MOD_RES (4)..(4): phosphorylated serine
SSESPTNHFY

SEQ ID NO: 2676 - protein, 17 aa, Artificial Sequence
  Description of Artificial Sequence: Synthetic peptide
  MOD_RES (11)..(11): phosphorylated serine
SSNGKMASRRSEEKEAG

SEQ ID NO: 2677 - protein, 19 aa, Artificial Sequence
  Description of Artificial Sequence: Synthetic peptide
  MOD_RES (11)..(11): phosphorylated serine
SSNGKMASRRSEEKEAGEI

SEQ ID NO: 2678 - protein, 11 aa, Artificial Sequence
  Description of Artificial Sequence: Synthetic peptide
  MOD_RES (2)..(2): phosphorylated serine
SSPIMRKKVSL

SEQ ID NO: 2679 - protein, 20 aa, Artificial Sequence
  Description of Artificial Sequence: Synthetic peptide
  MOD_RES (1)..(1): phosphorylated serine
SSPPFPVPVYTRQAPKQVIK

SEQ ID NO: 2680 - protein, 12 aa, Artificial Sequence
  Description of Artificial Sequence: Synthetic peptide
  MOD_RES (3)..(3): phosphorylated serine
SSSPTHAKSAHV

SEQ ID NO: 2681 - protein, 16 aa, Artificial Sequence
  Description of Artificial Sequence: Synthetic peptide
  MOD_RES (3)..(3): phosphorylated serine
SSSWRILGSKQSEHRP

SEQ ID NO: 2682 - protein, 9 aa, Artificial Sequence
  Description of Artificial Sequence: Synthetic peptide
  MOD_RES (5)..(5): phosphorylated serine
STDISPTRL

SEQ ID NO: 2683 - protein, 9 aa, Artificial Sequence
  Description of Artificial Sequence: Synthetic peptide
  MOD_RES (5)..(5): phosphorylated serine
STDISPTRY

SEQ ID NO: 2684 - protein, 8 aa, Artificial Sequence
  Description of Artificial Sequence: Synthetic peptide
  MOD_RES (6)..(6): phosphorylated serine
STDKHSEY

SEQ ID NO: 2685 - protein, 10 aa, Artificial Sequence
  Description of Artificial Sequence: Synthetic peptide
  MOD_RES (9)..(9): phosphorylated serine
STDPASQLSY

SEQ ID NO: 2686 - protein, 9 aa, Artificial Sequence
  Description of Artificial Sequence: Synthetic peptide
  MOD_RES (4)..(4): phosphorylated serine
STDSETLRY

SEQ ID NO: 2687 - protein, 8 aa, Artificial Sequence
  Description of Artificial Sequence: Synthetic peptide
  MOD_RES (4)..(4): phosphorylated serine
STDSPQKY

SEQ ID NO: 2688 - protein, 10 aa, Artificial Sequence
  Description of Artificial Sequence: Synthetic peptide
  MOD_RES (4)..(4): phosphorylated serine
STDSPSYVLY

SEQ ID NO: 2689 - protein, 10 aa, Artificial Sequence
  Description of Artificial Sequence: Synthetic peptide
  MOD_RES (4)..(4): phosphorylated serine
STDSPTNHFY

SEQ ID NO: 2690 - protein, 9 aa, Artificial Sequence
  Description of Artificial Sequence: Synthetic peptide
  MOD_RES (5)..(5): phosphorylated serine
STEISPTRL

SEQ ID NO: 2691 - protein, 9 aa, Artificial Sequence
  Description of Artificial Sequence: Synthetic peptide
  MOD_RES (5)..(5): phosphorylated serine
STEISPTRY

SEQ ID NO: 2692 - protein, 8 aa, Artificial Sequence
  Description of Artificial Sequence: Synthetic peptide
  MOD_RES (6)..(6): phosphorylated serine
STEKHSEY

SEQ ID NO: 2693 - protein, 10 aa, Artificial Sequence
  Description of Artificial Sequence: Synthetic peptide
  MOD_RES (9)..(9): phosphorylated serine
STEPASQLSY

SEQ ID NO: 2694 - protein, 9 aa, Artificial Sequence
  Description of Artificial Sequence: Synthetic peptide
  MOD_RES (4)..(4): phosphorylated serine
STESETLRY

SEQ ID NO: 2695 - protein, 8 aa, Artificial Sequence
  Description of Artificial Sequence: Synthetic peptide
  MOD_RES (4)..(4): phosphorylated serine
STESPQKY

SEQ ID NO: 2696 - protein, 10 aa, Artificial Sequence
  Description of Artificial Sequence: Synthetic peptide
  MOD_RES (4)..(4): phosphorylated serine
STESPSYVLY

SEQ ID NO: 2697 - protein, 10 aa, Artificial Sequence
  Description of Artificial Sequence: Synthetic peptide
  MOD_RES (4)..(4): phosphorylated serine
STESPTNHFY

SEQ ID NO: 2698 - protein, 10 aa, Artificial Sequence
  Description of Artificial Sequence: Synthetic peptide
  MOD_RES (6)..(6): phosphorylated serine
STIQNSPTKK

SEQ ID NO: 2699 - protein, 10 aa, Artificial Sequence
  Description of Artificial Sequence: Synthetic peptide
  MOD_RES (1)..(1): phosphorylated serine
STMSLNIITV

SEQ ID NO: 2700 - protein, 10 aa, Artificial Sequence
  Description of Artificial Sequence: Synthetic peptide
  MOD_RES (4)..(4): phosphorylated serine
STMSLNIITV

SEQ ID NO: 2701 - protein, 9 aa, Artificial Sequence
  Description of Artificial Sequence: Synthetic peptide
  MOD_RES (5)..(5): phosphorylated serine
SVDISPIRL

SEQ ID NO: 2702 - protein, 9 aa, Artificial Sequence
  Description of Artificial Sequence: Synthetic peptide
  MOD_RES (5)..(5): phosphorylated serine
SVDISPTRL

SEQ ID NO: 2703 - protein, 9 aa, Artificial Sequence
  Description of Artificial Sequence: Synthetic peptide
  MOD_RES (5)..(5): phosphorylated serine
SVDISPTRY

SEQ ID NO: 2704 - protein, 9 aa, Artificial Sequence
  Description of Artificial Sequence: Synthetic peptide
  MOD_RES (4)..(4): phosphorylated serine
SVFSPSFGL

SEQ ID NO: 2705 - protein, 10 aa, Artificial Sequence
  Description of Artificial Sequence: Synthetic peptide
  MOD_RES (4)..(4): phosphorylated serine
SVGSDYYIQL

SEQ ID NO: 2706 - protein, 9 aa, Artificial Sequence
  Description of Artificial Sequence: Synthetic peptide
  MOD_RES (8)..(8): phosphorylated serine
SVKPRRTSL

SEQ ID NO: 2707 - protein, 9 aa, Artificial Sequence
  Description of Artificial Sequence: Synthetic peptide
  MOD_RES (4)..(4): phosphorylated serine
SVKSPVTVK

SEQ ID NO: 2708 - protein, 9 aa, Artificial Sequence
  Description of Artificial Sequence: Synthetic peptide
  MOD_RES (4)..(4): phosphorylated serine
SVKSPVTVY

SEQ ID NO: 2709 - protein, 9 aa, Artificial Sequence
  Description of Artificial Sequence: Synthetic peptide
  MOD_RES (4)..(4): phosphorylated serine
SVLSPSFQL

SEQ ID NO: 2710 - protein, 9 aa, Artificial Sequence
  Description of Artificial Sequence: Synthetic peptide
  MOD_RES (5)..(5): phosphorylated serine
SVMDSPKKL

SEQ ID NO: 2711 - protein, 9 aa, Artificial Sequence
  Description of Artificial Sequence: Synthetic peptide
  MOD_RES (5)..(5): phosphorylated serine
SVRRSVLMK

SEQ ID NO: 2712 - protein, 9 aa, Artificial Sequence
  Description of Artificial Sequence: Synthetic peptide
  MOD_RES (5)..(5): phosphorylated serine
SVRRSVLMY

SEQ ID NO: 2713 - protein, 9 aa, Artificial Sequence
  Description of Artificial Sequence: Synthetic peptide
  MOD_RES (4)..(4): phosphorylated serine
SVRSLSLSL

SEQ ID NO: 2714 - protein, 12 aa, Artificial Sequence
  Description of Artificial Sequence: Synthetic peptide
  MOD_RES (4)..(4): phosphorylated serine
SVYSGDFGNLEV

SEQ ID NO: 2715 - protein, 9 aa, Artificial Sequence
  Description of Artificial Sequence: Synthetic peptide
  MOD_RES (4)..(4): phosphorylated serine
SVYSPVKKK

SEQ ID NO: 2716 - protein, 9 aa, Artificial Sequence
  Description of Artificial Sequence: Synthetic peptide
  MOD_RES (4)..(4): phosphorylated serine
SVYSPVKKY

SEQ ID NO: 2717 - protein, 9 aa, Artificial Sequence
  Description of Artificial Sequence: Synthetic peptide
  MOD_RES (1)..(1): phosphorylated serine
SYIEHIFEI

SEQ ID NO: 2718 - protein, 10 aa, Artificial Sequence
  Description of Artificial Sequence: Synthetic peptide
  MOD_RES (4)..(4): phosphorylated serine
SYPSPVATSY

SEQ ID NO: 2719 - protein, 9 aa, Artificial Sequence
  Description of Artificial Sequence: Synthetic peptide
  MOD_RES (1)..(1): phosphorylated serine
SYQKVIELF

SEQ ID NO: 2720 - protein, 8 aa, Artificial Sequence
  Description of Artificial Sequence: Synthetic peptide
  MOD_RES (5)..(5): phosphorylated serine
TDKYSKMM

SEQ ID NO: 2721 - protein, 9 aa, Artificial Sequence
  Description of Artificial Sequence: Synthetic peptide
  MOD_RES (4)..(4): phosphorylated serine
TEASPESML

SEQ ID NO: 2722 - protein, 20 aa, Artificial Sequence
  Description of Artificial Sequence: Synthetic peptide
  MOD_RES (18)..(18): phosphorylated serine
  MOD_RES (19)..(19): phosphorylated serine
THKGEIRGASTPFQFRASSP

SEQ ID NO: 2723 - protein, 15 aa, Artificial Sequence
  Description of Artificial Sequence: Synthetic peptide
  MOD_RES (9)..(9): phosphorylated serine
TIGEKKEPSDKSVDS

SEQ ID NO: 2724 - protein, 18 aa, Artificial Sequence
  Description of Artificial Sequence: Synthetic peptide
  MOD_RES (15)..(15): phosphorylated serine
TKDKYMASRGQKAKSMEG

SEQ ID NO: 2725 - protein, 14 aa, Artificial Sequence
  Description of Artificial Sequence: Synthetic peptide
  MOD_RES (3)..(3): phosphorylated serine
TKSVKALSSLHGDD

SEQ ID NO: 2726 - protein, 15 aa, Artificial Sequence
  Description of Artificial Sequence: Synthetic peptide
  MOD_RES (3)..(3): phosphorylated serine
TKSVKALSSLHGDDQ

SEQ ID NO: 2727 - protein, 16 aa, Artificial Sequence
  Description of Artificial Sequence: Synthetic peptide
  MOD_RES (3)..(3): phosphorylated serine
TKSVKALSSLHGDDQD

SEQ ID NO: 2728 - protein, 11 aa, Artificial Sequence
  Description of Artificial Sequence: Synthetic peptide
  MOD_RES (4)..(4): phosphorylated serine
TLASPSVFKST

SEQ ID NO: 2729 - protein, 11 aa, Artificial Sequence
  Description of Artificial Sequence: Synthetic peptide
  MOD_RES (4)..(4): phosphorylated serine
TLASPSVFKSV

SEQ ID NO: 2730 - protein, 9 aa, Artificial Sequence
  Description of Artificial Sequence: Synthetic peptide
  MOD_RES (5)..(5): phosphorylated serine
TLLASPMLK

SEQ ID NO: 2731 - protein, 9 aa, Artificial Sequence
  Description of Artificial Sequence: Synthetic peptide
  MOD_RES (8)..(8): phosphorylated serine
TLMERTVSL

SEQ ID NO: 2732 - protein, 9 aa, Artificial Sequence
  Description of Artificial Sequence: Synthetic peptide
  MOD_RES (4)..(4): phosphorylated serine
TLSSPPPGL

SEQ ID NO: 2733 - protein, 10 aa, Artificial Sequence
  Description of Artificial Sequence: Synthetic peptide
  MOD_RES (4)..(4): phosphorylated serine
TMASPGKDNY

SEQ ID NO: 2734 - protein, 11 aa, Artificial Sequence
  Description of Artificial Sequence: Synthetic peptide
  MOD_RES (4)..(4): phosphorylated serine
TMASPSVFKST

SEQ ID NO: 2735 - protein, 11 aa, Artificial Sequence
  Description of Artificial Sequence: Synthetic peptide
  MOD_RES (4)..(4): phosphorylated serine
TMASPSVFKSV

SEQ ID NO: 2736 - protein, 10 aa, Artificial Sequence
  Description of Artificial Sequence: Synthetic peptide
  MOD_RES (4)..(4): phosphorylated serine
TMDSPGKDNY

SEQ ID NO: 2737 - protein, 10 aa, Artificial Sequence
  Description of Artificial Sequence: Synthetic peptide
  MOD_RES (4)..(4): phosphorylated serine
TMESPGKDNY

SEQ ID NO: 2738 - protein, 9 aa, Artificial Sequence
  Description of Artificial Sequence: Synthetic peptide
  MOD_RES (4)..(4): phosphorylated serine
TMMSPSQFL

SEQ ID NO: 2739 - protein, 10 aa, Artificial Sequence
  Description of Artificial Sequence: Synthetic peptide
  MOD_RES (9)..(9): phosphorylated serine
TPAQPQRRSF

SEQ ID NO: 2740 - protein, 10 aa, Artificial Sequence
  Description of Artificial Sequence: Synthetic peptide
  MOD_RES (9)..(9): phosphorylated serine
TPAQPQRRSL

SEQ ID NO: 2741 - protein, 10 aa, Artificial Sequence
  Description of Artificial Sequence: Synthetic peptide
  MOD_RES (9)..(9): phosphorylated serine
TPAQPQRRSM

SEQ ID NO: 2742 - protein, 10 aa, Artificial Sequence
  Description of Artificial Sequence: Synthetic peptide
  MOD_RES (9)..(9): phosphorylated serine
TPAQPQRRSV

SEQ ID NO: 2743 - protein, 19 aa, Artificial Sequence
  Description of Artificial Sequence: Synthetic peptide
  MOD_RES (12)..(12): phosphorylated serine
TPDPSKFFSQLSSEHGGDV

SEQ ID NO: 2744 - protein, 20 aa, Artificial Sequence
  Description of Artificial Sequence: Synthetic peptide
  MOD_RES (1)..(1): phosphorylated threonine
TPDPSKFFSQLSSEHGGDVQ

SEQ ID NO: 2745 - protein, 11 aa, Artificial Sequence
  Description of Artificial Sequence: Synthetic peptide
  MOD_RES (4)..(4): phosphorylated serine
TPISPGRASGF

SEQ ID NO: 2746 - protein, 11 aa, Artificial Sequence
  Description of Artificial Sequence: Synthetic peptide
  MOD_RES (4)..(4): phosphorylated serine
TPISPGRASGL

SEQ ID NO: 2747 - protein, 11 aa, Artificial Sequence
  Description of Artificial Sequence: Synthetic peptide
  MOD_RES (4)..(4): phosphorylated serine
TPISPGRASGM

SEQ ID NO: 2748 - protein, 11 aa, Artificial Sequence
  Description of Artificial Sequence: Synthetic peptide
  MOD_RES (4)..(4): phosphorylated serine
TPISPGRASGV

SEQ ID NO: 2749 - protein, 9 aa, Artificial Sequence
  Description of Artificial Sequence: Synthetic peptide
  MOD_RES (8)..(8): phosphorylated serine
TPMKKHLSL

SEQ ID NO: 2750 - protein, 9 aa, Artificial Sequence
  Description of Artificial Sequence: Synthetic peptide
  MOD_RES (4)..(4): phosphorylated serine
TPRSPPLGF

SEQ ID NO: 2751 - protein, 9 aa, Artificial Sequence
  Description of Artificial Sequence: Synthetic peptide
  MOD_RES (4)..(4): phosphorylated serine
TPRSPPLGL

SEQ ID NO: 2752 - protein, 10 aa, Artificial Sequence
  Description of Artificial Sequence: Synthetic peptide
  MOD_RES (4)..(4): phosphorylated serine
TPRSPPLGLF

SEQ ID NO: 2753 - protein, 10 aa, Artificial Sequence
  Description of Artificial Sequence: Synthetic peptide
  MOD_RES (4)..(4): phosphorylated serine
TPRSPPLGLI

SEQ ID NO: 2754 - protein, 10 aa, Artificial Sequence
  Description of Artificial Sequence: Synthetic peptide
  MOD_RES (4)..(4): phosphorylated serine
TPRSPPLGLL

SEQ ID NO: 2755 - protein, 10 aa, Artificial Sequence
  Description of Artificial Sequence: Synthetic peptide
  MOD_RES (4)..(4): phosphorylated serine
TPRSPPLGLM

SEQ ID NO: 2756 - protein, 10 aa, Artificial Sequence
  Description of Artificial Sequence: Synthetic peptide
  MOD_RES (4)..(4): phosphorylated serine
TPRSPPLGLV

SEQ ID NO: 2757 - protein, 9 aa, Artificial Sequence
  Description of Artificial Sequence: Synthetic peptide
  MOD_RES (4)..(4): phosphorylated serine
TPRSPPLGM

SEQ ID NO: 2758 - protein, 9 aa, Artificial Sequence
  Description of Artificial Sequence: Synthetic peptide
  MOD_RES (4)..(4): phosphorylated serine
TPRSPPLGV

SEQ ID NO: 2759 - protein, 9 aa, Artificial Sequence
  Description of Artificial Sequence: Synthetic peptide
  MOD_RES (7)..(7): phosphorylated serine
TQSSGKSSV

SEQ ID NO: 2760 - protein, 9 aa, Artificial Sequence
  Description of Artificial Sequence: Synthetic peptide
  MOD_RES (4)..(4): phosphorylated threonine
TRKTPESFL

SEQ ID NO: 2761 - protein, 11 aa, Artificial Sequence
  Description of Artificial Sequence: Synthetic peptide
  MOD_RES (4)..(4): phosphorylated serine
TRLSPAKIVLF

SEQ ID NO: 2762 - protein, 11 aa, Artificial Sequence
  Description of Artificial Sequence: Synthetic peptide
  MOD_RES (4)..(4): phosphorylated serine
TRLSPAKIVLK

SEQ ID NO: 2763 - protein, 11 aa, Artificial Sequence
  Description of Artificial Sequence: Synthetic peptide
  MOD_RES (4)..(4): phosphorylated serine
TRLSPAKIVLR

SEQ ID NO: 2764 - protein, 11 aa, Artificial Sequence
  Description of Artificial Sequence: Synthetic peptide
  MOD_RES (4)..(4): phosphorylated serine
TRLSPAKIVLY

SEQ ID NO: 2765 - protein, 10 aa, Artificial Sequence
  Description of Artificial Sequence: Synthetic peptide
  MOD_RES (4)..(4): phosphorylated serine
TSASPGKDNY

SEQ ID NO: 2766 - protein, 10 aa, Artificial Sequence
  Description of Artificial Sequence: Synthetic peptide
  MOD_RES (4)..(4): phosphorylated serine
TSDSPGKDNY

SEQ ID NO: 2767 - protein, 11 aa, Artificial Sequence
  Description of Artificial Sequence: Synthetic peptide
  MOD_RES (4)..(4): phosphorylated threonine
TSDTPDYLLKY

SEQ ID NO: 2768 - protein, 10 aa, Artificial Sequence
  Description of Artificial Sequence: Synthetic peptide
  MOD_RES (4)..(4): phosphorylated serine
TSESPGKDNY

SEQ ID NO: 2769 - protein, 11 aa, Artificial Sequence
  Description of Artificial Sequence: Synthetic peptide
  MOD_RES (4)..(4): phosphorylated threonine
TSETPDYLLKY

SEQ ID NO: 2770 - protein, 10 aa, Artificial Sequence
  Description of Artificial Sequence: Synthetic peptide
  MOD_RES (4)..(4): phosphorylated serine
TTASPGKDNY

SEQ ID NO: 2771 - protein, 10 aa, Artificial Sequence
  Description of Artificial Sequence: Synthetic peptide
  MOD_RES (4)..(4): phosphorylated serine
TTDSPGKDNY

SEQ ID NO: 2772 - protein, 11 aa, Artificial Sequence
  Description of Artificial Sequence: Synthetic peptide
  MOD_RES (4)..(4): phosphorylated threonine
TTDTPDYLLKY

SEQ ID NO: 2773 - protein, 10 aa, Artificial Sequence
  Description of Artificial Sequence: Synthetic peptide
  MOD_RES (4)..(4): phosphorylated serine
TTESPGKDNY

SEQ ID NO: 2774 - protein, 11 aa, Artificial Sequence
  Description of Artificial Sequence: Synthetic peptide
  MOD_RES (4)..(4): phosphorylated threonine
TTETPDYLLKY

SEQ ID NO: 2775 - protein, 13 aa, Artificial Sequence
  Description of Artificial Sequence: Synthetic peptide
  MOD_RES (4)..(4): phosphorylated serine
TTKSVKALSSLHG

SEQ ID NO: 2776 - protein, 15 aa, Artificial Sequence
  Description of Artificial Sequence: Synthetic peptide
  MOD_RES (4)..(4): phosphorylated serine
TTKSVKALSSLHGDD

SEQ ID NO: 2777 - protein, 16 aa, Artificial Sequence
  Description of Artificial Sequence: Synthetic peptide
  MOD_RES (4)..(4): phosphorylated serine
TTKSVKALSSLHGDDQ

SEQ ID NO: 2778 - protein, 17 aa, Artificial Sequence
  Description of Artificial Sequence: Synthetic peptide
  MOD_RES (4)..(4): phosphorylated serine
TTKSVKALSSLHGDDQD

SEQ ID NO: 2779 - protein, 18 aa, Artificial Sequence
  Description of Artificial Sequence: Synthetic peptide
  MOD_RES (4)..(4): phosphorylated serine
TTKSVKALSSLHGDDQDS

SEQ ID NO: 2780 - protein, 20 aa, Artificial Sequence
  Description of Artificial Sequence: Synthetic peptide
  MOD_RES (4)..(4): phosphorylated serine
  MOD_RES (18)..(18): phosphorylated serine
TTKSVKALSSLHGDDQDSED

SEQ ID NO: 2781 - protein, 20 aa, Artificial Sequence
  Description of Artificial Sequence: Synthetic peptide
  MOD_RES (18)..(18): phosphorylated serine
TTKSVKALSSLHGDDQDSED

SEQ ID NO: 2782 - protein, 21 aa, Artificial Sequence
  Description of Artificial Sequence: Synthetic peptide
  MOD_RES (4)..(4): phosphorylated serine
  MOD_RES (18)..(18): phosphorylated serine
TTKSVKALSSLHGDDQDSEDE

SEQ ID NO: 2783 - protein, 21 aa, Artificial Sequence
  Description of Artificial Sequence: Synthetic peptide
  MOD_RES (18)..(18): phosphorylated serine
TTKSVKALSSLHGDDQDSEDE

SEQ ID NO: 2784 - protein, 10 aa, Artificial Sequence
  Description of Artificial Sequence: Synthetic peptide
  MOD_RES (4)..(4): phosphorylated serine
TVFSPTLPAA

SEQ ID NO: 2785 - protein, 11 aa, Artificial Sequence
  Description of Artificial Sequence: Synthetic peptide
  MOD_RES (4)..(4): phosphorylated serine
TVMSNSSVIHL

SEQ ID NO: 2786 - protein, 7 aa, Artificial Sequence
  Description of Artificial Sequence: Synthetic peptide
  MOD_RES (6)..(6): phosphorylated serine
VAKRLSL

SEQ ID NO: 2787 - protein, 27 aa, Artificial Sequence
  Description of Artificial Sequence: Synthetic peptide
  MOD_RES (13)..(13): phosphorylated serine
VAMPVKKSPRRSSSDEQGLSYSSLKNV

SEQ ID NO: 2788 - protein, 10 aa, Artificial Sequence
  Description of Artificial Sequence: Synthetic peptide
  MOD_RES (4)..(4): phosphorylated serine
VIDSQELSKV

SEQ ID NO: 2789 - protein, 9 aa, Artificial Sequence
  Description of Artificial Sequence: Synthetic peptide
  MOD_RES (4)..(4): phosphorylated serine
VLDSPASKK

SEQ ID NO: 2790 - protein, 10 aa, Artificial Sequence
  Description of Artificial Sequence: Synthetic peptide
  MOD_RES (6)..(6): phosphorylated serine
VLFPESPARA

SEQ ID NO: 2791 - protein, 10 aa, Artificial Sequence
  Description of Artificial Sequence: Synthetic peptide
  MOD_RES (5)..(5): phosphorylated threonine
VLFRTPLASV

SEQ ID NO: 2792 - protein, 9 aa, Artificial Sequence
  Description of Artificial Sequence: Synthetic peptide
  MOD_RES (4)..(4): phosphorylated serine
VLFSSPPQM

SEQ ID NO: 2793 - protein, 9 aa, Artificial Sequence
  Description of Artificial Sequence: Synthetic peptide
  MOD_RES (5)..(5): phosphorylated serine
VLFSSPPQM

SEQ ID NO: 2794 - protein, 9 aa, Artificial Sequence
  Description of Artificial Sequence: Synthetic peptide
  MOD_RES (8)..(8): phosphorylated serine
VLIENVASL

SEQ ID NO: 2795 - protein, 9 aa, Artificial Sequence
  Description of Artificial Sequence: Synthetic peptide
  MOD_RES (5)..(5): phosphorylated serine
VLIGSPKKV

SEQ ID NO: 2796 - protein, 9 aa, Artificial Sequence
  Description of Artificial Sequence: Synthetic peptide
  MOD_RES (5)..(5): phosphorylated serine
VLIGSPKKY

SEQ ID NO: 2797 - protein, 10 aa, Artificial Sequence
  Description of Artificial Sequence: Synthetic peptide
  MOD_RES (5)..(5): phosphorylated serine
VLKGSRSSEL

SEQ ID NO: 2798 - protein, 10 aa, Artificial Sequence
  Description of Artificial Sequence: Synthetic peptide
  MOD_RES (5)..(5): phosphorylated serine
VLKGSRSSEV

SEQ ID NO: 2799 - protein, 12 aa, Artificial Sequence
  Description of Artificial Sequence: Synthetic peptide
  MOD_RES (7)..(7): phosphorylated serine
  MOD_RES (8)..(8): phosphorylated serine
VLKSRKSSVTEE

SEQ ID NO: 2800 - protein, 10 aa, Artificial Sequence
  Description of Artificial Sequence: Synthetic peptide
  MOD_RES (8)..(8): phosphorylated serine
VLKVMIGSPK

SEQ ID NO: 2801 - protein, 11 aa, Artificial Sequence
  Description of Artificial Sequence: Synthetic peptide
  MOD_RES (8)..(8): phosphorylated serine
VLKVMIGSPKK

SEQ ID NO: 2802 - protein, 12 aa, Artificial Sequence
  Description of Artificial Sequence: Synthetic peptide
  MOD_RES (8)..(8): phosphorylated serine
VLKVMIGSPKKK

SEQ ID NO: 2803 - protein, 9 aa, Artificial Sequence
  Description of Artificial Sequence: Synthetic peptide
  MOD_RES (4)..(4): phosphorylated serine
VLLSPVPEL

SEQ ID NO: 2804 - protein, 9 aa, Artificial Sequence
  Description of Artificial Sequence: Synthetic peptide
  MOD_RES (4)..(4): phosphorylated serine
VLLSPVPEV

SEQ ID NO: 2805 - protein, 10 aa, Artificial Sequence
  Description of Artificial Sequence: Synthetic peptide
  MISC_FEATURE (5)..(7): at least one serine residue in the amino acid sequence SPS is phosphorylated
VLMKSPSPAL

SEQ ID NO: 2806 - protein, 10 aa, Artificial Sequence
  Description of Artificial Sequence: Synthetic peptide
  MISC_FEATURE (5)..(7): at least one serine residue in the amino acid sequence SPS is phosphorylated
VLMKSPSPAV

SEQ ID NO: 2807 - protein, 9 aa, Artificial Sequence
  Description of Artificial Sequence: Synthetic peptide
  MOD_RES (4)..(4): phosphorylated threonine
VLQTPPYVK

SEQ ID NO: 2808 - protein, 10 aa, Artificial Sequence
  Description of Artificial Sequence: Synthetic peptide
  MOD_RES (4)..(4): phosphorylated threonine
VLQTPPYVKK

SEQ ID NO: 2809 - protein, 10 aa, Artificial Sequence
  Description of Artificial Sequence: Synthetic peptide
  MOD_RES (4)..(4): phosphorylated threonine
VLQTPPYVKY

SEQ ID NO: 2810 - protein, 9 aa, Artificial Sequence
  Description of Artificial Sequence: Synthetic peptide
  MOD_RES (8)..(8): phosphorylated serine
VLSDVIPSI

SEQ ID NO: 2811 - protein, 10 aa, Artificial Sequence
  Description of Artificial Sequence: Synthetic peptide
  MOD_RES (6)..(6): phosphorylated threonine
VLSSLTPAKV

SEQ ID NO: 2812 - protein, 9 aa, Artificial Sequence
  Description of Artificial Sequence: Synthetic peptide
  MOD_RES (8)..(8): phosphorylated serine
VLVVDTPSI

SEQ ID NO: 2813 - protein, 9 aa, Artificial Sequence
  Description of Artificial Sequence: Synthetic peptide
  MOD_RES (4)..(4): phosphorylated serine
VLYSPQMAL

SEQ ID NO: 2814 - protein, 10 aa, Artificial Sequence
  Description of Artificial Sequence: Synthetic peptide
  MOD_RES (5)..(5): phosphorylated threonine
VMFRTPLASV

SEQ ID NO: 2815 - protein, 8 aa, Artificial Sequence
  Description of Artificial Sequence: Synthetic peptide
  MOD_RES (5)..(5): phosphorylated serine
VMIGSKKV

SEQ ID NO: 2816 - protein, 9 aa, Artificial Sequence
  Description of Artificial Sequence: Synthetic peptide
  MOD_RES (5)..(5): phosphorylated serine
VMIGSPKKV

SEQ ID NO: 2817 - protein, 9 aa, Artificial Sequence
  Description of Artificial Sequence: Synthetic peptide
  MOD_RES (5)..(5): phosphorylated serine
VMIGSPKKY

SEQ ID NO: 2818 - protein, 10 aa, Artificial Sequence
  Description of Artificial Sequence: Synthetic peptide
  MOD_RES (8)..(8): phosphorylated serine
VMKVMIGSPK

SEQ ID NO: 2819 - protein, 11 aa, Artificial Sequence
  Description of Artificial Sequence: Synthetic peptide
  MOD_RES (8)..(8): phosphorylated serine
VMKVMIGSPKK

SEQ ID NO: 2820 - protein, 12 aa, Artificial Sequence
  Description of Artificial Sequence: Synthetic peptide
  MOD_RES (8)..(8): phosphorylated serine
VMKVMIGSPKKK

SEQ ID NO: 2821 - protein, 12 aa, Artificial Sequence
  Description of Artificial Sequence: Synthetic peptide
  MOD_RES (8)..(8): phosphorylated serine
VMKVMIGSPKKY

SEQ ID NO: 2822 - protein, 9 aa, Artificial Sequence
  Description of Artificial Sequence: Synthetic peptide
  MOD_RES (4)..(4): phosphorylated serine
VMLSPVPEL

SEQ ID NO: 2823 - protein, 9 aa, Artificial Sequence
  Description of Artificial Sequence: Synthetic peptide
  MOD_RES (4)..(4): phosphorylated serine
VMLSPVPEV

SEQ ID NO: 2824 - protein, 9 aa, Artificial Sequence
  Description of Artificial Sequence: Synthetic peptide
  MOD_RES (4)..(4): phosphorylated threonine
VMQTPPYVK

SEQ ID NO: 2825 - protein, 10 aa, Artificial Sequence
  Description of Artificial Sequence: Synthetic peptide
  MOD_RES (4)..(4): phosphorylated threonine
VMQTPPYVKK

SEQ ID NO: 2826 - protein, 13 aa, Artificial Sequence
  Description of Artificial Sequence: Synthetic peptide
  MOD_RES (10)..(10): phosphorylated serine
VPHHGFEDWSQIR

SEQ ID NO: 2827 - protein, 10 aa, Artificial Sequence
  Description of Artificial Sequence: Synthetic peptide
  MOD_RES (9)..(9): phosphorylated serine
VPKSGRSSSL

SEQ ID NO: 2828 - protein, 9 aa, Artificial Sequence
  Description of Artificial Sequence: Synthetic peptide
  MOD_RES (4)..(4): phosphorylated serine
VPKSPAFAL

SEQ ID NO: 2829 - protein, 9 aa, Artificial Sequence
  Description of Artificial Sequence: Synthetic peptide
  MOD_RES (8)..(8): phosphorylated serine
VPLIRKKSL

SEQ ID NO: 2830 - protein, 20 aa, Artificial Sequence
  Description of Artificial Sequence: Synthetic peptide
  MOD_RES (12)..(12): phosphorylated serine
VPNAPPAYEKLSAEQSPPPY

SEQ ID NO: 2831 - protein, 10 aa, Artificial Sequence
  Description of Artificial Sequence: Synthetic peptide
  MOD_RES (9)..(9): phosphorylated serine
VPREVLRLSF

SEQ ID NO: 2832 - protein, 10 aa, Artificial Sequence
  Description of Artificial Sequence: Synthetic peptide
  MOD_RES (9)..(9): phosphorylated serine
VPREVLRLSL

SEQ ID NO: 2833 - protein, 10 aa, Artificial Sequence
  Description of Artificial Sequence: Synthetic peptide
  MOD_RES (9)..(9): phosphorylated serine
VPREVLRLSM

SEQ ID NO: 2834 - protein, 10 aa, Artificial Sequence
  Description of Artificial Sequence: Synthetic peptide
  MOD_RES (9)..(9): phosphorylated serine
VPREVLRLSV

SEQ ID NO: 2835 - protein, 10 aa, Artificial Sequence
  Description of Artificial Sequence: Synthetic peptide
  MOD_RES (8)..(8): phosphorylated serine
VPRPERRSSL

SEQ ID NO: 2836 - protein, 13 aa, Artificial Sequence
  Description of Artificial Sequence: Synthetic peptide
  MOD_RES (4)..(4): phosphorylated serine
VPRSPKHAHSSSF

SEQ ID NO: 2837 - protein, 13 aa, Artificial Sequence
  Description of Artificial Sequence: Synthetic peptide
  MOD_RES (4)..(4): phosphorylated serine
VPRSPKHAHSSSL

SEQ ID NO: 2838 - protein, 13 aa, Artificial Sequence
  Description of Artificial Sequence: Synthetic peptide
  MOD_RES (4)..(4): phosphorylated serine
VPRSPKHAHSSSM

SEQ ID NO: 2839 - protein, 13 aa, Artificial Sequence
  Description of Artificial Sequence: Synthetic peptide
  MOD_RES (4)..(4): phosphorylated serine
VPRSPKHAHSSSV

SEQ ID NO: 2840 - protein, 9 aa, Artificial Sequence
  Description of Artificial Sequence: Synthetic peptide
  MOD_RES (4)..(4): phosphorylated threonine
VPSTPKSSL

SEQ ID NO: 2841 - protein, 9 aa, Artificial Sequence
  Description of Artificial Sequence: Synthetic peptide
  MOD_RES (4)..(4): phosphorylated serine
VPTSPKSSL

SEQ ID NO: 2842 - protein, 9 aa, Artificial Sequence
  Description of Artificial Sequence: Synthetic peptide
  MOD_RES (4)..(4): phosphorylated serine
VPVSPGQQL

SEQ ID NO: 2843 - protein, 9 aa, Artificial Sequence
  Description of Artificial Sequence: Synthetic peptide
  MOD_RES (4)..(4): phosphorylated serine
VRASKDLAQ

SEQ ID NO: 2844 - protein, 17 aa, Artificial Sequence
  Description of Artificial Sequence: Synthetic peptide
  MOD_RES (4)..(4): phosphorylated serine
VRQSVTSFPDADAFHHQ

SEQ ID NO: 2845 - protein, 12 aa, Artificial Sequence
  Description of Artificial Sequence: Synthetic peptide
  MOD_RES (8)..(8): phosphorylated serine
VSKVMIGSPKKV

SEQ ID NO: 2846 - protein, 12 aa, Artificial Sequence
  Description of Artificial Sequence: Synthetic peptide
  MOD_RES (8)..(8): phosphorylated serine
VSKVMIGSPKKY

SEQ ID NO: 2847 - protein, 10 aa, Artificial Sequence
  Description of Artificial Sequence: Synthetic peptide
  MOD_RES (4)..(4): phosphorylated threonine
VTQTPPYVKK

SEQ ID NO: 2848 - protein, 10 aa, Artificial Sequence
  Description of Artificial Sequence: Synthetic peptide
  MOD_RES (4)..(4): phosphorylated threonine
VTQTPPYVKY

SEQ ID NO: 2849 - protein, 10 aa, Artificial Sequence
  Description of Artificial Sequence: Synthetic peptide
  MOD_RES (4)..(4): phosphorylated serine
VVDSPGQEVL

SEQ ID NO: 2850 - protein, 9 aa, Artificial Sequence
  Description of Artificial Sequence: Synthetic peptide
  MOD_RES (4)..(4): phosphorylated tyrosine
VYTYIQSRF

SEQ ID NO: 2851 - protein, 12 aa, Artificial Sequence
  Description of Artificial Sequence: Synthetic peptide
  MOD_RES (5)..(5): phosphorylated serine
WTHLSSKEVDPS

SEQ ID NO: 2852 - protein, 14 aa, Artificial Sequence
  Description of Artificial Sequence: Synthetic peptide
  MOD_RES (5)..(5): phosphorylated serine
WTHLSSKEVDPSTG

SEQ ID NO: 2853 - protein, 9 aa, Artificial Sequence
  Description of Artificial Sequence: Synthetic peptide
  MOD_RES (4)..(4): phosphorylated serine
YARSVHEEF

SEQ ID NO: 2854 - protein, 9 aa, Artificial Sequence
  Description of Artificial Sequence: Synthetic peptide
  MOD_RES (8)..(8): phosphorylated serine
YAVPRRGSL

SEQ ID NO: 2855 - protein, 9 aa, Artificial Sequence
  Description of Artificial Sequence: Synthetic peptide
  MOD_RES (8)..(8): phosphorylated tyrosine
YAYDGKDYI

SEQ ID NO: 2856 - protein, 8 aa, Artificial Sequence
  Description of Artificial Sequence: Synthetic peptide
  MOD_RES (4)..(4): phosphorylated serine
YEGSPIKV

SEQ ID NO: 2857 - protein, 12 aa, Artificial Sequence
  Description of Artificial Sequence: Synthetic peptide
  MOD_RES (5)..(5): phosphorylated serine
YEKLSAEQSPPP

SEQ ID NO: 2858 - protein, 8 aa, Artificial Sequence
  Description of Artificial Sequence: Synthetic peptide
  MOD_RES (3)..(3): phosphorylated serine
YFSPFRPY

SEQ ID NO: 2859 - protein, 6 aa, Artificial Sequence
  Description of Artificial Sequence: Synthetic peptide
  MOD_RES (1)..(1): phosphorylated tyrosine
YIQSRF

SEQ ID NO: 2860 - protein, 9 aa, Artificial Sequence
  Description of Artificial Sequence: Synthetic peptide
  MOD_RES (4)..(4): phosphorylated serine
YLASLEKKL

SEQ ID NO: 2861 - protein, 9 aa, Artificial Sequence
  Description of Artificial Sequence: Synthetic peptide
  MOD_RES (4)..(4): phosphorylated serine
YLDSGIHSG

SEQ ID NO: 2862 - protein, 10 aa, Artificial Sequence
  Description of Artificial Sequence: Synthetic peptide
  MOD_RES (4)..(4): phosphorylated serine
  MOD_RES (8)..(8): phosphorylated serine
YLDSGIHSGA

SEQ ID NO: 2863 - protein, 10 aa, Artificial Sequence
  Description of Artificial Sequence: Synthetic peptide
  MOD_RES (4)..(4): phosphorylated serine
YLDSGIHSGA

SEQ ID NO: 2864 - protein, 10 aa, Artificial Sequence
  Description of Artificial Sequence: Synthetic peptide
  MOD_RES (4)..(4): phosphorylated serine
  MOD_RES (8)..(8): phosphorylated serine
YLDSGIHSGV

SEQ ID NO: 2865 - protein, 10 aa, Artificial Sequence
  Description of Artificial Sequence: Synthetic peptide
  MOD_RES (4)..(4): phosphorylated serine
YLDSGIHSGV

SEQ ID NO: 2866 - protein, 8 aa, Artificial Sequence
  Description of Artificial Sequence: Synthetic peptide
  MOD_RES (1)..(1): phosphorylated tyrosine
YLGLDVPV

SEQ ID NO: 2867 - protein, 11 aa, Artificial Sequence
  Description of Artificial Sequence: Synthetic peptide
  MOD_RES (4)..(4): phosphorylated serine
YLGSISTLVTL

SEQ ID NO: 2868 - protein, 9 aa, Artificial Sequence
  Description of Artificial Sequence: Synthetic peptide
  MOD_RES (5)..(5): phosphorylated serine
YLIHSPMSL

SEQ ID NO: 2869 - protein, 9 aa, Artificial Sequence
  Description of Artificial Sequence: Synthetic peptide
  MOD_RES (4)..(4): phosphorylated serine
YLLSPLNTL

SEQ ID NO: 2870 - protein, 11 aa, Artificial Sequence
  Description of Artificial Sequence: Synthetic peptide
  MOD_RES (4)..(4): phosphorylated serine
YLLSPTKLPSI

SEQ ID NO: 2871 - protein, 11 aa, Artificial Sequence
  Description of Artificial Sequence: Synthetic peptide
  MOD_RES (4)..(4): phosphorylated serine
YLLSPTKLPSV

SEQ ID NO: 2872 - protein, 9 aa, Artificial Sequence
  Description of Artificial Sequence: Synthetic peptide
  MOD_RES (1)..(1): phosphorylated tyrosine
YLQSRYYRA

SEQ ID NO: 2873 - protein, 9 aa, Artificial Sequence
  Description of Artificial Sequence: Synthetic peptide
  MOD_RES (4)..(4): phosphorylated serine
YLQSRYYRA

SEQ ID NO: 2874 - protein, 11 aa, Artificial Sequence
  Description of Artificial Sequence: Synthetic peptide
  MOD_RES (5)..(5): phosphorylated serine
YLSDSDTEAKL

SEQ ID NO: 2875 - protein, 10 aa, Artificial Sequence
  Description of Artificial Sequence: Synthetic peptide
  MOD_RES (4)..(4): phosphorylated serine
  MOD_RES (8)..(8): phosphorylated serine
YMDSGIHSGA

SEQ ID NO: 2876 - protein, 10 aa, Artificial Sequence
  Description of Artificial Sequence: Synthetic peptide
  MOD_RES (4)..(4): phosphorylated serine
YMDSGIHSGA

SEQ ID NO: 2877 - protein, 10 aa, Artificial Sequence
  Description of Artificial Sequence: Synthetic peptide
  MOD_RES (4)..(4): phosphorylated serine
  MOD_RES (8)..(8): phosphorylated serine
YMDSGIHSGV

SEQ ID NO: 2878 - protein, 10 aa, Artificial Sequence
  Description of Artificial Sequence: Synthetic peptide
  MOD_RES (4)..(4): phosphorylated serine
YMDSGIHSGV

SEQ ID NO: 2879 - protein, 10 aa, Artificial Sequence
  Description of Artificial Sequence: Synthetic peptide
  MOD_RES (6)..(6): phosphorylated serine
YPDPHSPFAV

SEQ ID NO: 2880 - protein, 9 aa, Artificial Sequence
  Description of Artificial Sequence: Synthetic peptide
  MOD_RES (7)..(7): phosphorylated serine
YPGGRRSSL

SEQ ID NO: 2881 - protein, 11 aa, Artificial Sequence
  Description of Artificial Sequence: Synthetic peptide
  MOD_RES (4)..(4): phosphorylated serine
YPLSPAKVNQY

SEQ ID NO: 2882 - protein, 11 aa, Artificial Sequence
  Description of Artificial Sequence: Synthetic peptide
  MOD_RES (4)..(4): phosphorylated serine
YPLSPTKISEY

SEQ ID NO: 2883 - protein, 11 aa, Artificial Sequence
  Description of Artificial Sequence: Synthetic peptide
  MOD_RES (4)..(4): phosphorylated serine
YPLSPTKISQY

SEQ ID NO: 2884 - protein, 12 aa, Artificial Sequence
  Description of Artificial Sequence: Synthetic peptide
  MOD_RES (4)..(4): phosphorylated serine
YPRSEDEVEGVM

SEQ ID NO: 2885 - protein, 11 aa, Artificial Sequence
  Description of Artificial Sequence: Synthetic peptide
  MOD_RES (4)..(4): phosphorylated serine
YPRSFDEVEGF

SEQ ID NO: 2886 - protein, 11 aa, Artificial Sequence
  Description of Artificial Sequence: Synthetic peptide
  MOD_RES (4)..(4): phosphorylated serine
YPRSFDEVEGL

SEQ ID NO: 2887 - protein, 11 aa, Artificial Sequence
  Description of Artificial Sequence: Synthetic peptide
  MOD_RES (4)..(4): phosphorylated serine
YPRSFDEVEGM

SEQ ID NO: 2888 - protein, 11 aa, Artificial Sequence
  Description of Artificial Sequence: Synthetic peptide
  MOD_RES (4)..(4): phosphorylated serine
YPRSFDEVEGV

SEQ ID NO: 2889 - protein, 12 aa, Artificial Sequence
  Description of Artificial Sequence: Synthetic peptide
  MOD_RES (4)..(4): phosphorylated serine
YPRSFDEVEGVF

SEQ ID NO: 2890 - protein, 12 aa, Artificial Sequence
  Description of Artificial Sequence: Synthetic peptide
  MOD_RES (4)..(4): phosphorylated serine
YPRSFDEVEGVL

SEQ ID NO: 2891 - protein, 12 aa, Artificial Sequence
  Description of Artificial Sequence: Synthetic peptide
  MOD_RES (4)..(4): phosphorylated serine
YPRSFDEVEGVM

SEQ ID NO: 2892 - protein, 12 aa, Artificial Sequence
  Description of Artificial Sequence: Synthetic peptide
  MOD_RES (4)..(4): phosphorylated serine
YPRSFDEVEGVV

SEQ ID NO: 2893 - protein, 9 aa, Artificial Sequence
  Description of Artificial Sequence: Synthetic peptide
  MOD_RES (7)..(7): phosphorylated serine
YPSFRRSSL

SEQ ID NO: 2894 - protein, 9 aa, Artificial Sequence
  Description of Artificial Sequence: Synthetic peptide
  MOD_RES (4)..(4): phosphorylated serine
YPSSPRKAL

SEQ ID NO: 2895 - protein, 8 aa, Artificial Sequence
  Description of Artificial Sequence: Synthetic peptide
  MOD_RES (4)..(4): phosphorylated serine
YPSSPRKF

SEQ ID NO: 2896 - protein, 8 aa, Artificial Sequence
  Description of Artificial Sequence: Synthetic peptide
  MOD_RES (4)..(4): phosphorylated serine
YPSSPRKL

SEQ ID NO: 2897 - protein, 8 aa, Artificial Sequence
  Description of Artificial Sequence: Synthetic peptide
  MOD_RES (4)..(4): phosphorylated serine
YPSSPRKM

SEQ ID NO: 2898 - protein, 8 aa, Artificial Sequence
  Description of Artificial Sequence: Synthetic peptide
  MOD_RES (4)..(4): phosphorylated serine
YPSSPRKV

SEQ ID NO: 2899 - protein, 10 aa, Artificial Sequence
  Description of Artificial Sequence: Synthetic peptide
  MOD_RES (6)..(6): phosphorylated serine
YPYEFSPVKM

SEQ ID NO: 2900 - protein, 11 aa, Artificial Sequence
  Description of Artificial Sequence: Synthetic peptide
  MOD_RES (4)..(4): phosphorylated serine
YQLSPTKLPSI

SEQ ID NO: 2901 - protein, 11 aa, Artificial Sequence
  Description of Artificial Sequence: Synthetic peptide
  MOD_RES (4)..(4): phosphorylated serine
YQLSPTKLPSV

SEQ ID NO: 2902 - protein, 10 aa, Artificial Sequence
  Description of Artificial Sequence: Synthetic peptide
  MOD_RES (6)..(6): phosphorylated serine
YQRPFSPSAY

SEQ ID NO: 2903 - protein, 11 aa, Artificial Sequence
  Description of Artificial Sequence: Synthetic peptide
  MOD_RES (4)..(4): phosphorylated serine
YQRSFDEVEGF

SEQ ID NO: 2904 - protein, 11 aa, Artificial Sequence
  Description of Artificial Sequence: Synthetic peptide
  MOD_RES (4)..(4): phosphorylated serine
YQRSFDEVEGL

SEQ ID NO: 2905 - protein, 11 aa, Artificial Sequence
  Description of Artificial Sequence: Synthetic peptide
  MOD_RES (4)..(4): phosphorylated serine
YQRSFDEVEGM

SEQ ID NO: 2906 - protein, 11 aa, Artificial Sequence
  Description of Artificial Sequence: Synthetic peptide
  MOD_RES (4)..(4): phosphorylated serine
YQRSFDEVEGV

SEQ ID NO: 2907 - protein, 12 aa, Artificial Sequence
  Description of Artificial Sequence: Synthetic peptide
  MOD_RES (4)..(4): phosphorylated serine
YQRSFDEVEGVF

SEQ ID NO: 2908 - protein, 12 aa, Artificial Sequence
  Description of Artificial Sequence: Synthetic peptide
  MOD_RES (4)..(4): phosphorylated serine
YQRSFDEVEGVL

SEQ ID NO: 2909 - protein, 12 aa, Artificial Sequence
  Description of Artificial Sequence: Synthetic peptide
  MOD_RES (4)..(4): phosphorylated serine
YQRSFDEVEGVM

SEQ ID NO: 2910 - protein, 12 aa, Artificial Sequence
  Description of Artificial Sequence: Synthetic peptide
  MOD_RES (4)..(4): phosphorylated serine
YQRSFDEVEGVV

SEQ ID NO: 2911 - protein, 9 aa, Artificial Sequence
  Description of Artificial Sequence: Synthetic peptide
  MOD_RES (4)..(4): phosphorylated serine
YRYSPQSFL

SEQ ID NO: 2912 - protein, 9 aa, Artificial Sequence
  Description of Artificial Sequence: Synthetic peptide
  MOD_RES (5)..(5): phosphorylated threonine
YTAGTPYKV

SEQ ID NO: 2913 - protein, 17 aa, Artificial Sequence
  Description of Artificial Sequence: Synthetic peptide
  MOD_RES (8)..(8): phosphorylated serine
YYTAGSSSPTHAKSAHV

SEQ ID NO: 2914 - protein, 9 aa, Artificial Sequence
  Description of Artificial Sequence: Synthetic peptide
  MOD_RES (4)..(4): O-GlcNAcylated threonine
  MOD_RES (5)..(5): O-GlcNAcylated serine
ALTTSAHSV

SEQ ID NO: 2915 - protein, 9 aa, Artificial Sequence
  Description of Artificial Sequence: Synthetic peptide
  MOD_RES (4)..(4): O-GlcNAcylated threonine
ALTTSAHSV

SEQ ID NO: 2916 - protein, 9 aa, Artificial Sequence
  Description of Artificial Sequence: Synthetic peptide
  MOD_RES (5)..(5): O-GlcNAcylated serine
ALTTSAHSV

SEQ ID NO: 2917 - protein, 10 aa, Artificial Sequence
  Description of Artificial Sequence: Synthetic peptide
  MISC_FEATURE (4)..(6): at least one of the serine or threonine residues is modified with O-GlcNAc
APPSTSAAAL

SEQ ID NO: 2918 - protein, 10 aa, Artificial Sequence
  Description of Artificial Sequence: Synthetic peptide
  MOD_RES (4)..(4): O-GlcNAcylated serine
APPSTSAAAL

SEQ ID NO: 2919 - protein, 10 aa, Artificial Sequence
  Description of Artificial Sequence: Synthetic peptide
  MOD_RES (4)..(4): O-GlcNAcylated serine
  MOD_RES (6)..(6): O-GlcNAcylated serine
APPSTSAAAL

SEQ ID NO: 2920 - protein, 10 aa, Artificial Sequence
  Description of Artificial Sequence: Synthetic peptide
  MOD_RES (5)..(5): O-GlcNAcylated threonine
APPSTSAAAL

SEQ ID NO: 2921 - protein, 10 aa, Artificial Sequence
  Description of Artificial Sequence: Synthetic peptide
  MOD_RES (6)..(6): O-GlcNAcylated serine
APPSTSAAAL

SEQ ID NO: 2922 - protein, 10 aa, Artificial Sequence
  Description of Artificial Sequence: Synthetic peptide
  MOD_RES (4)..(4): O-GlcNAcylated serine
  MOD_RES (5)..(5): O-GlcNAcylated threonine
APPSTSAAAL

SEQ ID NO: 2923 - protein, 10 aa, Artificial Sequence
  Description of Artificial Sequence: Synthetic peptide
  MOD_RES (5)..(5): O-GlcNAcylated threonine
  MOD_RES (6)..(6): O-GlcNAcylated serine
APPSTSAAAL

SEQ ID NO: 2924 - protein, 10 aa, Artificial Sequence
  Description of Artificial Sequence: Synthetic peptide
  MOD_RES (4)..(4): hexose-GlcNAcylated serine
APPSTSAAAL

SEQ ID NO: 2925 - protein, 10 aa, Artificial Sequence
  Description of Artificial Sequence: Synthetic peptide
  MOD_RES (5)..(5): hexose-GlcNAcylated threonine
APPSTSAAAL

SEQ ID NO: 2926 - protein, 10 aa, Artificial Sequence
  Description of Artificial Sequence: Synthetic peptide
  MOD_RES (6)..(6): hexose-GlcNAcylated serine
APPSTSAAAL

SEQ ID NO: 2927 - protein, 10 aa, Artificial Sequence
  Description of Artificial Sequence: Synthetic peptide
  MOD_RES (5)..(5): hexose-GlcNAcylated threonine
  MOD_RES (6)..(6): O-GlcNAcylated serine
APPSTSAAAL

SEQ ID NO: 2928 - protein, 10 aa, Artificial Sequence
  Description of Artificial Sequence: Synthetic peptide
  MOD_RES (4)..(4): hexose-GlcNAcylated serine
  MOD_RES (5)..(5): hexose-GlcNAcylated threonine
APPSTSAAAL

SEQ ID NO: 2929 - protein, 10 aa, Artificial Sequence
  Description of Artificial Sequence: Synthetic peptide
  MOD_RES (4)..(4): hexose-GlcNAcylated serine
  MOD_RES (6)..(6): hexose-GlcNAcylated serine
APPSTSAAAL

SEQ ID NO: 2930 - protein, 10 aa, Artificial Sequence
  Description of Artificial Sequence: Synthetic peptide
  MOD_RES (5)..(5): hexose-GlcNAcylated threonine
  MOD_RES (6)..(6): hexose-GlcNAcylated serine
APPSTSAAAL

SEQ ID NO: 2931 - protein, 9 aa, Artificial Sequence
  Description of Artificial Sequence: Synthetic peptide
  MOD_RES (5)..(5): hexose-GlcNAcylated asparagine
APRGNVTSL

SEQ ID NO: 2932 - protein, 9 aa, Artificial Sequence
  Description of Artificial Sequence: Synthetic peptide
  MOD_RES (4)..(4): O-GlcNAcylated threonine
APRTNGVAM

SEQ ID NO: 2933 - protein, 8 aa, Artificial Sequence
  Description of Artificial Sequence: Synthetic peptide
  MOD_RES (4)..(4): O-GlcNAcylated serine
APTSAAAL

SEQ ID NO: 2934 - protein, 9 aa, Artificial Sequence
  Description of Artificial Sequence: Synthetic peptide
  MOD_RES (4)..(4): O-GlcNAcylated serine
APTSASNVM

SEQ ID NO: 2935 - protein, 9 aa, Artificial Sequence
  Description of Artificial Sequence: Synthetic peptide
  MOD_RES (6)..(6): O-GlcNAcylated serine
APTSASNVM

SEQ ID NO: 2936 - protein, 9 aa, Artificial Sequence
  Description of Artificial Sequence: Synthetic peptide
  MOD_RES (4)..(4): O-GlcNAcylated serine
APVSASASV

SEQ ID NO: 2937 - protein, 9 aa, Artificial Sequence
  Description of Artificial Sequence: Synthetic peptide
  MOD_RES (4)..(4): O-GlcNAcylated serine
APVSSKSSL

SEQ ID NO: 2938 - protein, 9 aa, Artificial Sequence
  Description of Artificial Sequence: Synthetic peptide
  MISC_FEATURE (3)..(5): at least one of the serine or threonine residues is modified with O-GlcNAc
EPSSTVVSL

SEQ ID NO: 2939 - protein, 9 aa, Artificial Sequence
  Description of Artificial Sequence: Synthetic peptide
  MOD_RES (3)..(3): O-GlcNAcylated serine
EPSSTVVSL

SEQ ID NO: 2940 - protein, 9 aa, Artificial Sequence
  Description of Artificial Sequence: Synthetic peptide
  MOD_RES (4)..(4): O-GlcNAcylated serine
EPSSTVVSL

SEQ ID NO: 2941 - protein, 9 aa, Artificial Sequence
  Description of Artificial Sequence: Synthetic peptide
  MOD_RES (5)..(5): O-GlcNAcylated threonine
EPSSTVVSL

SEQ ID NO: 2942 - protein, 10 aa, Artificial Sequence
  Description of Artificial Sequence: Synthetic peptide
  MOD_RES (4)..(4): O-GlcNAcylated serine
GLSSLAEEAA

SEQ ID NO: 2943 - protein, 9 aa, Artificial Sequence
  Description of Artificial Sequence: Synthetic peptide
  MISC_FEATURE (1)..(9): two GlcNAc moeities were detected, but could not be assigned to specific amino acids
  MISC_FEATURE (3)..(5): at least one of the serine or threonine residues is modified with O-GlcNAc
HPSSSAAVL

SEQ ID NO: 2944 - protein, 10 aa, Artificial Sequence
  Description of Artificial Sequence: Synthetic peptide
  MISC_FEATURE (3)..(5): at least one of the serine or threonine residues is modified with O-GlcNAc
HPSSTASTAL

SEQ ID NO: 2945 - protein, 9 aa, Artificial Sequence
  Description of Artificial Sequence: Synthetic peptide
  MOD_RES (4)..(4): O-GlcNAcylated serine
HPMSTASQV

SEQ ID NO: 2946 - protein, 9 aa, Artificial Sequence
  Description of Artificial Sequence: Synthetic peptide
  MOD_RES (3)..(3): O-GlcNAcylated serine
  MOD_RES (4)..(4): O-GlcNAcylated serine
HPSSTAAVL

SEQ ID NO: 2947 - protein, 9 aa, Artificial Sequence
  Description of Artificial Sequence: Synthetic peptide
  MOD_RES (3)..(3): O-GlcNAcylated serine
  MOD_RES (5)..(5): O-GlcNAcylated threonine
HPSSTAAVL

SEQ ID NO: 2948 - protein, 9 aa, Artificial Sequence
  Description of Artificial Sequence: Synthetic peptide
  MOD_RES (4)..(4): O-GlcNAcylated serine
  MOD_RES (5)..(5): O-GlcNAcylated threonine
HPSSTAAVL

SEQ ID NO: 2949 - protein, 10 aa, Artificial Sequence
  Description of Artificial Sequence: Synthetic peptide
  MOD_RES (3)..(3): O-GlcNAcylated serine
HPSSTASTAL

SEQ ID NO: 2950 - protein, 10 aa, Artificial Sequence
  Description of Artificial Sequence: Synthetic peptide
  MOD_RES (4)..(4): O-GlcNAcylated serine
HPSSTASTAL

SEQ ID NO: 2951 - protein, 10 aa, Artificial Sequence
  Description of Artificial Sequence: Synthetic peptide
  MOD_RES (5)..(5): O-GlcNAcylated threonine
HPSSTASTAL

SEQ ID NO: 2952 - protein, 8 aa, Artificial Sequence
  Description of Artificial Sequence: Synthetic peptide
  MOD_RES (4)..(4): O-GlcNAcylated threonine
HPTTVASY

SEQ ID NO: 2953 - protein, 9 aa, Artificial Sequence
  Description of Artificial Sequence: Synthetic peptide
  MOD_RES (4)..(4): O-GlcNAcylated serine
IPISLHTSL

SEQ ID NO: 2954 - protein, 9 aa, Artificial Sequence
  Description of Artificial Sequence: Synthetic peptide
  MOD_RES (4)..(4): O-GlcNAcylated serine
IPTSSVLSL

SEQ ID NO: 2955 - protein, 9 aa, Artificial Sequence
  Description of Artificial Sequence: Synthetic peptide
  MOD_RES (4)..(4): O-GlcNAcylated serine
IPVSKPLSL

SEQ ID NO: 2956 - protein, 9 aa, Artificial Sequence
  Description of Artificial Sequence: Synthetic peptide
  MOD_RES (4)..(4): hexose-GlcNAcylated serine
IPVSKPLSL

SEQ ID NO: 2957 - protein, 9 aa, Artificial Sequence
  Description of Artificial Sequence: Synthetic peptide
  MOD_RES (4)..(4): O-GlcNAcylated serine
IPVSSHNSL

SEQ ID NO: 2958 - protein, 9 aa, Artificial Sequence
  Description of Artificial Sequence: Synthetic peptide
  MOD_RES (4)..(4): O-GlcNAcylated serine
  MOD_RES (5)..(5): O-GlcNAcylated serine
IPVSSHNSL

SEQ ID NO: 2959 - protein, 9 aa, Artificial Sequence
  Description of Artificial Sequence: Synthetic peptide
  MOD_RES (4)..(4): hexose-GlcNAcylated serine
IPVSSHNSL

SEQ ID NO: 2960 - protein, 9 aa, Artificial Sequence
  Description of Artificial Sequence: Synthetic peptide
  MOD_RES (4)..(4): acetyl-GlcNAcylated serine
IPVSSHNSL

SEQ ID NO: 2961 - protein, 10 aa, Artificial Sequence
  Description of Artificial Sequence: Synthetic peptide
  MOD_RES (4)..(4): O-GlcNAcylated threonine
KPPTSQSSVL

SEQ ID NO: 2962 - protein, 10 aa, Artificial Sequence
  Description of Artificial Sequence: Synthetic peptide
  MOD_RES (4)..(4): hexose-GlcNAcylated threonine
KPPTSQSSVL

SEQ ID NO: 2963 - protein, 10 aa, Artificial Sequence
  Description of Artificial Sequence: Synthetic peptide
  MOD_RES (5)..(5): O-GlcNAcylated serine
KPPTSQSSVL

SEQ ID NO: 2964 - protein, 10 aa, Artificial Sequence
  Description of Artificial Sequence: Synthetic peptide
  MOD_RES (5)..(5): hexose-GlcNAcylated serine
KPPTSQSSVL

SEQ ID NO: 2965 - protein, 9 aa, Artificial Sequence
  Description of Artificial Sequence: Synthetic peptide
  MOD_RES (5)..(5): hexose-GlcNAcylated serine
KPPVSFFSL

SEQ ID NO: 2966 - protein, 9 aa, Artificial Sequence
  Description of Artificial Sequence: Synthetic peptide
  MOD_RES (6)..(6): hexose-GlcNAcylated asparagine
KPTLYNVSL

SEQ ID NO: 2967 - protein, 8 aa, Artificial Sequence
  Description of Artificial Sequence: Synthetic peptide
  MISC_FEATURE (5)..(6): at least one of the serine or threonine residues is modified with O-GlcNAc
LPRNSTMM

SEQ ID NO: 2968 - protein, 8 aa, Artificial Sequence
  Description of Artificial Sequence: Synthetic peptide
  MOD_RES (5)..(5): O-GlcNAcylated serine
  MOD_RES (6)..(6): O-GlcNAcylated threonine
LPRNSTMM

SEQ ID NO: 2969 - protein, 9 aa, Artificial Sequence
  Description of Artificial Sequence: Synthetic peptide
  MOD_RES (4)..(4): O-GlcNAcylated serine
LPTSLPSSL

SEQ ID NO: 2970 - protein, 10 aa, Artificial Sequence
  Description of Artificial Sequence: Synthetic peptide
  MOD_RES (7)..(7): hexose-GlcNAcylated threonine
MPVRPTTNTF

SEQ ID NO: 2971 - protein, 10 aa, Artificial Sequence
  Description of Artificial Sequence: Synthetic peptide
  MOD_RES (4)..(4): di-methylated arginine
  MOD_RES (7)..(7): hexose-GlcNAcylated threonine
MPVRPTTNTF

SEQ ID NO: 2972 - protein, 9 aa, Artificial Sequence
  Description of Artificial Sequence: Synthetic peptide
  MOD_RES (4)..(4): O-GlcNAcylated threonine
MPVTSSSFF

SEQ ID NO: 2973 - protein, 8 aa, Artificial Sequence
  Description of Artificial Sequence: Synthetic peptide
  MOD_RES (4)..(4): O-GlcNAcylated serine
NPVSLPSL

SEQ ID NO: 2974 - protein, 9 aa, Artificial Sequence
  Description of Artificial Sequence: Synthetic peptide
  MOD_RES (4)..(4): hexose-GlcNAcylated threonine
PPSTSAAAL

SEQ ID NO: 2975 - protein, 9 aa, Artificial Sequence
  Description of Artificial Sequence: Synthetic peptide
  MOD_RES (5)..(5): hexose-GlcNAcylated serine
PPSTSAAAL

SEQ ID NO: 2976 - protein, 9 aa, Artificial Sequence
  Description of Artificial Sequence: Synthetic peptide
  MISC_FEATURE (4)..(6): at least one of the serine or threonine residues is modified with O-GlcNAc
RPPSSSQQL

SEQ ID NO: 2977 - protein, 9 aa, Artificial Sequence
  Description of Artificial Sequence: Synthetic peptide
  MOD_RES (5)..(5): O-GlcNAcylated threonine
RPPITQSSL

SEQ ID NO: 2978 - protein, 9 aa, Artificial Sequence
  Description of Artificial Sequence: Synthetic peptide
  MOD_RES (1)..(1): methylated arginine
  MOD_RES (5)..(5): O-GlcNAcylated threonine
RPPITQSSL

SEQ ID NO: 2979 - protein, 9 aa, Artificial Sequence
  Description of Artificial Sequence: Synthetic peptide
  MOD_RES (1)..(1): di-methylated arginine
  MOD_RES (5)..(5): O-GlcNAcylated threonine
RPPITQSSL

SEQ ID NO: 2980 - protein, 9 aa, Artificial Sequence
  Description of Artificial Sequence: Synthetic peptide
  MOD_RES (1)..(1): di-methylated arginine
  MOD_RES (5)..(5): acetyl-GlcNAcylated threonine
RPPITQSSL

SEQ ID NO: 2981 - protein, 10 aa, Artificial Sequence
  Description of Artificial Sequence: Synthetic peptide
  MOD_RES (5)..(5): hexose-GlcNAcylated serine
RPPQSSSVSL

SEQ ID NO: 2982 - protein, 9 aa, Artificial Sequence
  Description of Artificial Sequence: Synthetic peptide
  MOD_RES (4)..(4): O-GlcNAcylated serine
RPPSSSQQL

SEQ ID NO: 2983 - protein, 9 aa, Artificial Sequence
  Description of Artificial Sequence: Synthetic peptide
  MOD_RES (5)..(5): O-GlcNAcylated serine
RPPSSSQQL

SEQ ID NO: 2984 - protein, 9 aa, Artificial Sequence
  Description of Artificial Sequence: Synthetic peptide
  MOD_RES (6)..(6): O-GlcNAcylated serine
RPPSSSQQL

SEQ ID NO: 2985 - protein, 10 aa, Artificial Sequence
  Description of Artificial Sequence: Synthetic peptide
  MOD_RES (5)..(5): O-GlcNAcylated threonine
RPPVTKASSF

SEQ ID NO: 2986 - protein, 10 aa, Artificial Sequence
  Description of Artificial Sequence: Synthetic peptide
  MOD_RES (4)..(4): O-GlcNAcylated threonine
RPVTASITTM

SEQ ID NO: 2987 - protein, 10 aa, Artificial Sequence
  Description of Artificial Sequence: Synthetic peptide
  MOD_RES (5)..(5): O-GlcNAcylated serine
TPASSRAQTL

SEQ ID NO: 2988 - protein, 9 aa, Artificial Sequence
  Description of Artificial Sequence: Synthetic peptide
  MOD_RES (4)..(4): O-GlcNAcylated serine
TPASSSSAL

SEQ ID NO: 2989 - protein, 9 aa, Artificial Sequence
  Description of Artificial Sequence: Synthetic peptide
  MOD_RES (4)..(4): O-GlcNAcylated serine
TPISQAQKL

SEQ ID NO: 2990 - protein, 9 aa, Artificial Sequence
  Description of Artificial Sequence: Synthetic peptide
  MOD_RES (4)..(4): O-GlcNAcylated serine
TPVSSANMM

SEQ ID NO: 2991 - protein, 9 aa, Artificial Sequence
  Description of Artificial Sequence: Synthetic peptide
  MOD_RES (4)..(4): O-GlcNAcylated serine
VLTSNVQTI

SEQ ID NO: 2992 - protein, 9 aa, Artificial Sequence
  Description of Artificial Sequence: Synthetic peptide
  MOD_RES (4)..(4): O-GlcNAcylated serine
VPASSTSTL

SEQ ID NO: 2993 - protein, 10 aa, Artificial Sequence
  Description of Artificial Sequence: Synthetic peptide
  MOD_RES (4)..(4): O-GlcNAcylated threonine
VPATHGQVTY

SEQ ID NO: 2994 - protein, 8 aa, Artificial Sequence
  Description of Artificial Sequence: Synthetic peptide
  MOD_RES (3)..(3): O-GlcNAcylated threonine
VPTTSSSL

SEQ ID NO: 2995 - protein, 8 aa, Artificial Sequence
  Description of Artificial Sequence: Synthetic peptide
  MOD_RES (4)..(4): O-GlcNAcylated threonine
VPTTSSSL

SEQ ID NO: 2996 - protein, 8 aa, Artificial Sequence
  Description of Artificial Sequence: Synthetic peptide
  MOD_RES (5)..(5): O-GlcNAcylated serine
VPTTSSSL

SEQ ID NO: 2997 - protein, 9 aa, Artificial Sequence
  Description of Artificial Sequence: Synthetic peptide
  MOD_RES (4)..(4): O-GlcNAcylated serine
VPVSGTQGL

SEQ ID NO: 2998 - protein, 9 aa, Artificial Sequence
  Description of Artificial Sequence: Synthetic peptide
  MOD_RES (4)..(4): O-GlcNAcylated serine
VPVSNQSSL

SEQ ID NO: 2999 - protein, 9 aa, Artificial Sequence
  Description of Artificial Sequence: Synthetic peptide
  MOD_RES (4)..(4): O-GlcNAcylated serine
VPVSSASEL

SEQ ID NO: 3000 - protein, 9 aa, Artificial Sequence
  Description of Artificial Sequence: Synthetic peptide
  MOD_RES (4)..(4): O-GlcNAcylated serine
VPVSVGPSL

SEQ ID NO: 3001 - protein, 33 aa, Artificial Sequence
  Description of Artificial Sequence: Synthetic polypeptide
  MOD_RES (1)..(1): N-terminally acetylated serine
  MOD_RES (16)..(16): phosphorylated serine
SAARESHPHGVKRSASPDDDLGFFRKNLLRLTG

SEQ ID NO: 3002 - protein, 19 aa, Artificial Sequence
  Description of Artificial Sequence: Synthetic peptide
  MOD_RES (4)..(4): phosphorylated serine
AAESPSFLFFRKNLLRLTG

SEQ ID NO: 3003 - protein, 24 aa, Artificial Sequence
  Description of Artificial Sequence: Synthetic peptide
  MOD_RES (7)..(7): phosphorylated serine
AASNFKSPVKTIRFFRKNLLRLTG

SEQ ID NO: 3004 - protein, 20 aa, Artificial Sequence
  Description of Artificial Sequence: Synthetic peptide
  MOD_RES (4)..(4): phosphorylated serine
ADLSPEREVFFRKNLLRLTG

SEQ ID NO: 3005 - protein, 22 aa, Artificial Sequence
  Description of Artificial Sequence: Synthetic peptide
  MOD_RES (7)..(7): phosphorylated threonine
AEDEIGTPRKFFFRKNLLRLTG

SEQ ID NO: 3006 - protein, 22 aa, Artificial Sequence
  Description of Artificial Sequence: Synthetic peptide
  MOD_RES (7)..(7): phosphorylated threonine
AEDEIGTPRKYFFRKNLLRLTG

SEQ ID NO: 3007 - protein, 22 aa, Artificial Sequence
  Description of Artificial Sequence: Synthetic peptide
  MOD_RES (7)..(7): phosphorylated threonine
AEEEIGTPRKFFFRKNLLRLTG

SEQ ID NO: 3008 - protein, 22 aa, Artificial Sequence
  Description of Artificial Sequence: Synthetic peptide
  MOD_RES (7)..(7): phosphorylated threonine
AEEEIGTPRKWFFRKNLLRLTG

SEQ ID NO: 3009 - protein, 22 aa, Artificial Sequence
  Description of Artificial Sequence: Synthetic peptide
  MOD_RES (7)..(7): phosphorylated threonine
AEEEIGTPRKYFFRKNLLRLTG

SEQ ID NO: 3010 - protein, 20 aa, Artificial Sequence
  Description of Artificial Sequence: Synthetic peptide
  MOD_RES (8)..(8): phosphorylated serine
AENARSASFFFRKNLLRLTG

SEQ ID NO: 3011 - protein, 21 aa, Artificial Sequence
  Description of Artificial Sequence: Synthetic peptide
  MOD_RES (4)..(4): phosphorylated serine
AENSPTRQQFFFRKNLLRLTG

SEQ ID NO: 3012 - protein, 21 aa, Artificial Sequence
  Description of Artificial Sequence: Synthetic peptide
  MOD_RES (4)..(4): phosphorylated serine
AENSPTRQQWFFRKNLLRLTG

SEQ ID NO: 3013 - protein, 21 aa, Artificial Sequence
  Description of Artificial Sequence: Synthetic peptide
  MOD_RES (4)..(4): phosphorylated serine
AENSPTRQQYFFRKNLLRLTG

SEQ ID NO: 3014 - protein, 20 aa, Artificial Sequence
  Description of Artificial Sequence: Synthetic peptide
  MOD_RES (4)..(4): phosphorylated serine
AENSSSRELFFRKNLLRLTG

SEQ ID NO: 3015 - protein, 21 aa, Artificial Sequence
  Description of Artificial Sequence: Synthetic peptide
  MOD_RES (5)..(5): phosphorylated serine
AEQGSPRVSYFFRKNLLRLTG

SEQ ID NO: 3016 - protein, 22 aa, Artificial Sequence
  Description of Artificial Sequence: Synthetic peptide
  MOD_RES (4)..(4): phosphorylated serine
AESSPTAGKKFFFRKNLLRLTG

SEQ ID NO: 3017 - protein, 22 aa, Artificial Sequence
  Description of Artificial Sequence: Synthetic peptide
  MOD_RES (4)..(4): phosphorylated serine
AESSPTAGKKLFFRKNLLRLTG

SEQ ID NO: 3018 - protein, 22 aa, Artificial Sequence
  Description of Artificial Sequence: Synthetic peptide
  MOD_RES (4)..(4): phosphorylated serine
AESSPTAGKKWFFRKNLLRLTG

SEQ ID NO: 3019 - protein, 22 aa, Artificial Sequence
  Description of Artificial Sequence: Synthetic peptide
  MOD_RES (4)..(4): phosphorylated serine
AESSPTAGKKYFFRKNLLRLTG

SEQ ID NO: 3020 - protein, 20 aa, Artificial Sequence
  Description of Artificial Sequence: Synthetic peptide
  MOD_RES (4)..(4): phosphorylated serine
AGDSPGSQFFFRKNLLRLTG

SEQ ID NO: 3021 - protein, 20 aa, Artificial Sequence
  Description of Artificial Sequence: Synthetic peptide
  MOD_RES (4)..(4): phosphorylated serine
AILSPAFKVFFRKNLLRLTG

SEQ ID NO: 3022 - protein, 20 aa, Artificial Sequence
  Description of Artificial Sequence: Synthetic peptide
  MOD_RES (5)..(5): phosphorylated serine
AIMRSPQMVFFRKNLLRLTG

SEQ ID NO: 3023 - protein, 19 aa, Artificial Sequence
  Description of Artificial Sequence: Synthetic peptide
  MOD_RES (3)..(3): phosphorylated serine
AISDLQQLFFRKNLLRLTG

SEQ ID NO: 3024 - protein, 19 aa, Artificial Sequence
  Description of Artificial Sequence: Synthetic peptide
  MOD_RES (4)..(4): phosphorylated serine
AKLSETISFFRKNLLRLTG

SEQ ID NO: 3025 - protein, 20 aa, Artificial Sequence
  Description of Artificial Sequence: Synthetic peptide
  MOD_RES (5)..(5): phosphorylated serine
ALAASPHAVFFRKNLLRLTG

SEQ ID NO: 3026 - protein, 22 aa, Artificial Sequence
  Description of Artificial Sequence: Synthetic peptide
  MOD_RES (4)..(4): phosphorylated serine
ALDSGASLLHLFFRKNLLRLTG

SEQ ID NO: 3027 - protein, 22 aa, Artificial Sequence
  Description of Artificial Sequence: Synthetic peptide
  MOD_RES (4)..(4): phosphorylated serine
ALDSGASLLHVFFRKNLLRLTG

SEQ ID NO: 3028 - protein, 20 aa, Artificial Sequence
  Description of Artificial Sequence: Synthetic peptide
  MOD_RES (5)..(5): phosphorylated threonine
ALGNTPPFLFFRKNLLRLTG

SEQ ID NO: 3029 - protein, 22 aa, Artificial Sequence
  Description of Artificial Sequence: Synthetic peptide
  MOD_RES (4)..(4): phosphorylated serine
ALGSRESLATIFFRKNLLRLTG

SEQ ID NO: 3030 - protein, 22 aa, Artificial Sequence
  Description of Artificial Sequence: Synthetic peptide
  MOD_RES (4)..(4): phosphorylated serine
ALGSRESLATVFFRKNLLRLTG

SEQ ID NO: 3031 - protein, 20 aa, Artificial Sequence
  Description of Artificial Sequence: Synthetic peptide
  MOD_RES (6)..(6): phosphorylated serine
ALIHQSLGLFFRKNLLRLTG

SEQ ID NO: 3032 - protein, 20 aa, Artificial Sequence
  Description of Artificial Sequence: Synthetic peptide
  MOD_RES (6)..(6): phosphorylated serine
ALIHQSLGVFFRKNLLRLTG

SEQ ID NO: 3033 - protein, 24 aa, Artificial Sequence
  Description of Artificial Sequence: Synthetic peptide
  MOD_RES (7)..(7): phosphorylated serine
ALLGSKSPDPYRLFFRKNLLRLTG

SEQ ID NO: 3034 - protein, 24 aa, Artificial Sequence
  Description of Artificial Sequence: Synthetic peptide
  MOD_RES (7)..(7): phosphorylated serine
ALLGSKSPDPYRVFFRKNLLRLTG

SEQ ID NO: 3035 - protein, 20 aa, Artificial Sequence
  Description of Artificial Sequence: Synthetic peptide
  MOD_RES (4)..(4): phosphorylated serine
ALLSLLKRVFFRKNLLRLTG

SEQ ID NO: 3036 - protein, 20 aa, Artificial Sequence
  Description of Artificial Sequence: Synthetic peptide
  MOD_RES (5)..(5): phosphorylated serine
ALMGSPQLVFFRKNLLRLTG

SEQ ID NO: 3037 - protein, 22 aa, Artificial Sequence
  Description of Artificial Sequence: Synthetic peptide
  MOD_RES (5)..(5): phosphorylated serine
ALMGSPQLVAAFFRKNLLRLTG

SEQ ID NO: 3038 - protein, 21 aa, Artificial Sequence
  Description of Artificial Sequence: Synthetic peptide
  MOD_RES (5)..(5): phosphorylated serine
ALRSSPIMRKFFRKNLLRLTG

SEQ ID NO: 3039 - protein, 21 aa, Artificial Sequence
  Description of Artificial Sequence: Synthetic peptide
  MOD_RES (5)..(5): phosphorylated serine
ALRSSPIMRYFFRKNLLRLTG

SEQ ID NO: 3040 - protein, 22 aa, Artificial Sequence
  Description of Artificial Sequence: Synthetic peptide
  MOD_RES (4)..(4): phosphorylated serine
ALVSPPALHNAFFRKNLLRLTG

SEQ ID NO: 3041 - protein, 22 aa, Artificial Sequence
  Description of Artificial Sequence: Synthetic peptide
  MOD_RES (4)..(4): phosphorylated serine
ALVSPPALHNVFFRKNLLRLTG

SEQ ID NO: 3042 - protein, 20 aa, Artificial Sequence
  Description of Artificial Sequence: Synthetic peptide
  MOD_RES (4)..(4): phosphorylated serine
ALYSGVHKKFFRKNLLRLTG

SEQ ID NO: 3043 - protein, 20 aa, Artificial Sequence
  Description of Artificial Sequence: Synthetic peptide
  MOD_RES (4)..(4): phosphorylated serine
ALYSGVHKYFFRKNLLRLTG

SEQ ID NO: 3044 - protein, 21 aa, Artificial Sequence
  Description of Artificial Sequence: Synthetic peptide
  MOD_RES (4)..(4): phosphorylated serine
ALYSPAQPSLFFRKNLLRLTG

SEQ ID NO: 3045 - protein, 21 aa, Artificial Sequence
  Description of Artificial Sequence: Synthetic peptide
  MOD_RES (4)..(4): phosphorylated serine
ALYSPAQPSVFFRKNLLRLTG

SEQ ID NO: 3046 - protein, 20 aa, Artificial Sequence
  Description of Artificial Sequence: Synthetic peptide
  MOD_RES (4)..(4): phosphorylated threonine
ALYTPQAPKFFRKNLLRLTG

SEQ ID NO: 3047 - protein, 20 aa, Artificial Sequence
  Description of Artificial Sequence: Synthetic peptide
  MOD_RES (4)..(4): phosphorylated threonine
ALYTPQAPYFFRKNLLRLTG

SEQ ID NO: 3048 - protein, 20 aa, Artificial Sequence
  Description of Artificial Sequence: Synthetic peptide
  MOD_RES (5)..(5): phosphorylated serine
AMAASPHAVFFRKNLLRLTG

SEQ ID NO: 3049 - protein, 22 aa, Artificial Sequence
  Description of Artificial Sequence: Synthetic peptide
  MOD_RES (4)..(4): phosphorylated serine
AMDSGASLLHLFFRKNLLRLTG

SEQ ID NO: 3050 - protein, 22 aa, Artificial Sequence
  Description of Artificial Sequence: Synthetic peptide
  MOD_RES (4)..(4): phosphorylated serine
AMDSGASLLHVFFRKNLLRLTG

SEQ ID NO: 3051 - protein, 22 aa, Artificial Sequence
  Description of Artificial Sequence: Synthetic peptide
  MOD_RES (4)..(4): phosphorylated serine
AMGSRESLATIFFRKNLLRLTG

SEQ ID NO: 3052 - protein, 22 aa, Artificial Sequence
  Description of Artificial Sequence: Synthetic peptide
  MOD_RES (4)..(4): phosphorylated serine
AMGSRESLATVFFRKNLLRLTG

SEQ ID NO: 3053 - protein, 24 aa, Artificial Sequence
  Description of Artificial Sequence: Synthetic peptide
  MOD_RES (7)..(7): phosphorylated serine
AMLGSKSPDPYRLFFRKNLLRLTG

SEQ ID NO: 3054 - protein, 24 aa, Artificial Sequence
  Description of Artificial Sequence: Synthetic peptide
  MOD_RES (7)..(7): phosphorylated serine
AMLGSKSPDPYRVFFRKNLLRLTG

SEQ ID NO: 3055 - protein, 20 aa, Artificial Sequence
  Description of Artificial Sequence: Synthetic peptide
  MOD_RES (5)..(5): phosphorylated serine
AMPGSPVEVFFRKNLLRLTG

SEQ ID NO: 3056 - protein, 21 aa, Artificial Sequence
  Description of Artificial Sequence: Synthetic peptide
  MOD_RES (5)..(5): phosphorylated serine
AMRSSPIMRKFFRKNLLRLTG

SEQ ID NO: 3057 - protein, 22 aa, Artificial Sequence
  Description of Artificial Sequence: Synthetic peptide
  MOD_RES (4)..(4): phosphorylated serine
AMVSPPALHNAFFRKNLLRLTG

SEQ ID NO: 3058 - protein, 22 aa, Artificial Sequence
  Description of Artificial Sequence: Synthetic peptide
  MOD_RES (4)..(4): phosphorylated serine
AMVSPPALHNVFFRKNLLRLTG

SEQ ID NO: 3059 - protein, 20 aa, Artificial Sequence
  Description of Artificial Sequence: Synthetic peptide
  MOD_RES (4)..(4): phosphorylated serine
AMYSGVHKKFFRKNLLRLTG

SEQ ID NO: 3060 - protein, 20 aa, Artificial Sequence
  Description of Artificial Sequence: Synthetic peptide
  MOD_RES (4)..(4): phosphorylated serine
APDSPRAFLFFRKNLLRLTG

SEQ ID NO: 3061 - protein, 20 aa, Artificial Sequence
  Description of Artificial Sequence: Synthetic peptide
  MOD_RES (8)..(8): phosphorylated serine
APLARASSLFFRKNLLRLTG

SEQ ID NO: 3062 - protein, 20 aa, Artificial Sequence
  Description of Artificial Sequence: Synthetic peptide
  MOD_RES (9)..(9): phosphorylated serine
APPAYEKLSFFRKNLLRLTG

SEQ ID NO: 3063 - protein, 23 aa, Artificial Sequence
  Description of Artificial Sequence: Synthetic peptide
  MOD_RES (9)..(9): phosphorylated serine
APPAYEKLSAEQFFRKNLLRLTG

SEQ ID NO: 3064 - protein, 26 aa, Artificial Sequence
  Description of Artificial Sequence: Synthetic peptide
  MOD_RES (9)..(9): phosphorylated serine
APPAYEKLSAEQSPPFFRKNLLRLTG

SEQ ID NO: 3065 - protein, 27 aa, Artificial Sequence
  Description of Artificial Sequence: Synthetic peptide
  MOD_RES (9)..(9): phosphorylated serine
APPAYEKLSAEQSPPPFFRKNLLRLTG

SEQ ID NO: 3066 - protein, 28 aa, Artificial Sequence
  Description of Artificial Sequence: Synthetic peptide
  MOD_RES (9)..(9): phosphorylated serine
APPAYEKLSAEQSPPPYFFRKNLLRLTG

SEQ ID NO: 3067 - protein, 36 aa, Artificial Sequence
  Description of Artificial Sequence: Synthetic polypeptide
  MOD_RES (13)..(13): phosphorylated serine
APPPLVPAPRPSSPPRGPGPARADRFFRKNLLRLTG

SEQ ID NO: 3068 - protein, 23 aa, Artificial Sequence
  Description of Artificial Sequence: Synthetic peptide
  MOD_RES (6)..(6): phosphorylated serine
APRAPSASPLALFFRKNLLRLTG

SEQ ID NO: 3069 - protein, 21 aa, Artificial Sequence
  Description of Artificial Sequence: Synthetic peptide
  MOD_RES (9)..(9): phosphorylated serine
APRDRRAVSFFFRKNLLRLTG

SEQ ID NO: 3070 - protein, 21 aa, Artificial Sequence
  Description of Artificial Sequence: Synthetic peptide
  MOD_RES (6)..(6): phosphorylated serine
APRKGSFSALFFRKNLLRLTG

SEQ ID NO: 3071 - protein, 22 aa, Artificial Sequence
  Description of Artificial Sequence: Synthetic peptide
  MOD_RES (6)..(6): phosphorylated serine
APRKGSFSALFFFRKNLLRLTG

SEQ ID NO: 3072 - protein, 22 aa, Artificial Sequence
  Description of Artificial Sequence: Synthetic peptide
  MOD_RES (6)..(6): phosphorylated serine
APRKGSFSALLFFRKNLLRLTG

SEQ ID NO: 3073 - protein, 22 aa, Artificial Sequence
  Description of Artificial Sequence: Synthetic peptide
  MOD_RES (6)..(6): phosphorylated serine
APRKGSFSALMFFRKNLLRLTG

SEQ ID NO: 3074 - protein, 22 aa, Artificial Sequence
  Description of Artificial Sequence: Synthetic peptide
  MOD_RES (6)..(6): phosphorylated serine
APRKGSFSALVFFRKNLLRLTG

SEQ ID NO: 3075 - protein, 21 aa, Artificial Sequence
  Description of Artificial Sequence: Synthetic peptide
  MOD_RES (6)..(6): phosphorylated serine
APRNGSGVALFFRKNLLRLTG

SEQ ID NO: 3076 - protein, 20 aa, Artificial Sequence
  Description of Artificial Sequence: Synthetic peptide
  MOD_RES (6)..(6): phosphorylated serine
APRRYSSSFFFRKNLLRLTG

SEQ ID NO: 3077 - protein, 20 aa, Artificial Sequence
  Description of Artificial Sequence: Synthetic peptide
  MOD_RES (6)..(6): phosphorylated serine
APRRYSSSLFFRKNLLRLTG

SEQ ID NO: 3078 - protein, 20 aa, Artificial Sequence
  Description of Artificial Sequence: Synthetic peptide
  MOD_RES (6)..(6): phosphorylated serine
APRRYSSSMFFRKNLLRLTG

SEQ ID NO: 3079 - protein, 20 aa, Artificial Sequence
  Description of Artificial Sequence: Synthetic peptide
  MOD_RES (6)..(6): phosphorylated serine
APRRYSSSVFFRKNLLRLTG

SEQ ID NO: 3080 - protein, 21 aa, Artificial Sequence
  Description of Artificial Sequence: Synthetic peptide
  MOD_RES (4)..(4): phosphorylated serine
APRSPPPSRFFFRKNLLRLTG

SEQ ID NO: 3081 - protein, 21 aa, Artificial Sequence
  Description of Artificial Sequence: Synthetic peptide
  MOD_RES (4)..(4): phosphorylated serine
APRSPPPSRLFFRKNLLRLTG

SEQ ID NO: 3082 - protein, 21 aa, Artificial Sequence
  Description of Artificial Sequence: Synthetic peptide
  MOD_RES (4)..(4): phosphorylated serine
APRSPPPSRMFFRKNLLRLTG

SEQ ID NO: 3083 - protein, 21 aa, Artificial Sequence
  Description of Artificial Sequence: Synthetic peptide
  MOD_RES (4)..(4): phosphorylated serine
APRSPPPSRPFFRKNLLRLTG

SEQ ID NO: 3084 - protein, 21 aa, Artificial Sequence
  Description of Artificial Sequence: Synthetic peptide
  MOD_RES (4)..(4): phosphorylated serine
APRSPPPSRVFFRKNLLRLTG

SEQ ID NO: 3085 - protein, 21 aa, Artificial Sequence
  Description of Artificial Sequence: Synthetic peptide
  MOD_RES (9)..(9): phosphorylated threonine
APSLFHLNTLFFRKNLLRLTG

SEQ ID NO: 3086 - protein, 22 aa, Artificial Sequence
  Description of Artificial Sequence: Synthetic peptide
  MOD_RES (8)..(8): phosphorylated serine
APSSARASPLLFFRKNLLRLTG

SEQ ID NO: 3087 - protein, 23 aa, Artificial Sequence
  Description of Artificial Sequence: Synthetic peptide
  MOD_RES (9)..(9): phosphorylated serine
APSTYAHLSPAKFFRKNLLRLTG

SEQ ID NO: 3088 - protein, 28 aa, Artificial Sequence
  Description of Artificial Sequence: Synthetic peptide
  MOD_RES (9)..(9): phosphorylated serine
APSTYAHLSPAKTPPPPFFRKNLLRLTG

SEQ ID NO: 3089 - protein, 20 aa, Artificial Sequence
  Description of Artificial Sequence: Synthetic peptide
  MOD_RES (6)..(6): phosphorylated serine
APSVRSLSLFFRKNLLRLTG

SEQ ID NO: 3090 - protein, 20 aa, Artificial Sequence
  Description of Artificial Sequence: Synthetic peptide
  MOD_RES (8)..(8): phosphorylated serine
APSVRSLSLFFRKNLLRLTG

SEQ ID NO: 3091 - protein, 22 aa, Artificial Sequence
  Description of Artificial Sequence: Synthetic peptide
  MOD_RES (4)..(4): phosphorylated serine
ARFSPDDKYSFFFRKNLLRLTG

SEQ ID NO: 3092 - protein, 22 aa, Artificial Sequence
  Description of Artificial Sequence: Synthetic peptide
  MOD_RES (4)..(4): phosphorylated serine
ARFSPDDKYSKFFRKNLLRLTG

SEQ ID NO: 3093 - protein, 22 aa, Artificial Sequence
  Description of Artificial Sequence: Synthetic peptide
  MOD_RES (4)..(4): phosphorylated serine
ARFSPDDKYSLFFRKNLLRLTG

SEQ ID NO: 3094 - protein, 22 aa, Artificial Sequence
  Description of Artificial Sequence: Synthetic peptide
  MOD_RES (4)..(4): phosphorylated serine
ARFSPDDKYSMFFRKNLLRLTG

SEQ ID NO: 3095 - protein, 22 aa, Artificial Sequence
  Description of Artificial Sequence: Synthetic peptide
  MOD_RES (4)..(4): phosphorylated serine
ARFSPDDKYSRFFRKNLLRLTG

SEQ ID NO: 3096 - protein, 22 aa, Artificial Sequence
  Description of Artificial Sequence: Synthetic peptide
  MOD_RES (4)..(4): phosphorylated serine
ARFSPDDKYSYFFRKNLLRLTG

SEQ ID NO: 3097 - protein, 22 aa, Artificial Sequence
  Description of Artificial Sequence: Synthetic peptide
  MOD_RES (7)..(7): phosphorylated threonine
ASDEIGTPRKFFFRKNLLRLTG

SEQ ID NO: 3098 - protein, 22 aa, Artificial Sequence
  Description of Artificial Sequence: Synthetic peptide
  MOD_RES (7)..(7): phosphorylated threonine
ASDEIGTPRKYFFRKNLLRLTG

SEQ ID NO: 3099 - protein, 22 aa, Artificial Sequence
  Description of Artificial Sequence: Synthetic peptide
  MOD_RES (7)..(7): phosphorylated threonine
ASEEIGTPRKFFFRKNLLRLTG

SEQ ID NO: 3100 - protein, 22 aa, Artificial Sequence
  Description of Artificial Sequence: Synthetic peptide
  MOD_RES (7)..(7): phosphorylated threonine
ASEEIGTPRKYFFRKNLLRLTG

SEQ ID NO: 3101 - protein, 26 aa, Artificial Sequence
  Description of Artificial Sequence: Synthetic peptide
  MOD_RES (2)..(2): phosphorylated serine
  MOD_RES (7)..(7): phosphorylated serine
ASISRLSGEQVDGKGFFRKNLLRLTG

SEQ ID NO: 3102 - protein, 26 aa, Artificial Sequence
  Description of Artificial Sequence: Synthetic peptide
  MOD_RES (2)..(2): phosphorylated serine
ASISRLSGEQVDGKGFFRKNLLRLTG

SEQ ID NO: 3103 - protein, 26 aa, Artificial Sequence
  Description of Artificial Sequence: Synthetic peptide
  MOD_RES (7)..(7): phosphorylated serine
ASISRLSGEQVDGKGFFRKNLLRLTG

SEQ ID NO: 3104 - protein, 27 aa, Artificial Sequence
  Description of Artificial Sequence: Synthetic peptide
  MOD_RES (2)..(2): phosphorylated serine
  MOD_RES (4)..(4): phosphorylated serine
ASISRLSGEQVDGKGQFFRKNLLRLTG

SEQ ID NO: 3105 - protein, 27 aa, Artificial Sequence
  Description of Artificial Sequence: Synthetic peptide
  MOD_RES (2)..(2): phosphorylated serine
ASISRLSGEQVDKGKGFFRKNLLRLTG

SEQ ID NO: 3106 - protein, 24 aa, Artificial Sequence
  Description of Artificial Sequence: Synthetic peptide
  MOD_RES (5)..(5): phosphorylated serine
ASKASPTLDFTERFFRKNLLRLTG

SEQ ID NO: 3107 - protein, 38 aa, Artificial Sequence
  Description of Artificial Sequence: Synthetic polypeptide
  MOD_RES (22)..(22): phosphorylated serine
  MOD_RES (24)..(24): phosphorylated serine
ASKMTQPQSKSAFPLSRKNKGSGSLDGFFRKNLLRLTG

SEQ ID NO: 3108 - protein, 18 aa, Artificial Sequence
  Description of Artificial Sequence: Synthetic peptide
  MOD_RES (2)..(2): phosphorylated serine
ASLGFVFFFRKNLLRLTG

SEQ ID NO: 3109 - protein, 27 aa, Artificial Sequence
  Description of Artificial Sequence: Synthetic peptide
  MOD_RES (2)..(2): phosphorylated serine
ASPTIEAQGTSPAHDNFFRKNLLRLTG

SEQ ID NO: 3110 - protein, 28 aa, Artificial Sequence
  Description of Artificial Sequence: Synthetic peptide
  MOD_RES (2)..(2): phosphorylated serine
ASPTIEAQGTSPAHDNIFFRKNLLRLTG

SEQ ID NO: 3111 - protein, 29 aa, Artificial Sequence
  Description of Artificial Sequence: Synthetic peptide
  MOD_RES (2)..(2): phosphorylated serine
ASPTIEAQGTSPAHDNIAFFRKNLLRLTG

SEQ ID NO: 3112 - protein, 20 aa, Artificial Sequence
  Description of Artificial Sequence: Synthetic peptide
  MOD_RES (2)..(2): phosphorylated threonine
ATAGPRLGFFFRKNLLRLTG

SEQ ID NO: 3113 - protein, 20 aa, Artificial Sequence
  Description of Artificial Sequence: Synthetic peptide
  MOD_RES (2)..(2): phosphorylated threonine
ATAGPRLGWFFRKNLLRLTG

SEQ ID NO: 3114 - protein, 20 aa, Artificial Sequence
  Description of Artificial Sequence: Synthetic peptide
  MOD_RES (2)..(2): phosphorylated threonine
ATAGPRLGYFFRKNLLRLTG

SEQ ID NO: 3115 - protein, 22 aa, Artificial Sequence
  Description of Artificial Sequence: Synthetic peptide
  MOD_RES (7)..(7): phosphorylated threonine
ATDEIGTPRKFFFRKNLLRLTG

SEQ ID NO: 3116 - protein, 22 aa, Artificial Sequence
  Description of Artificial Sequence: Synthetic peptide
  MOD_RES (7)..(7): phosphorylated threonine
ATDEIGTPRKYFFRKNLLRLTG

SEQ ID NO: 3117 - protein, 22 aa, Artificial Sequence
  Description of Artificial Sequence: Synthetic peptide
  MOD_RES (7)..(7): phosphorylated threonine
ATEEIGTPRKFFFRKNLLRLTG

SEQ ID NO: 3118 - protein, 22 aa, Artificial Sequence
  Description of Artificial Sequence: Synthetic peptide
  MOD_RES (7)..(7): phosphorylated threonine
ATEEIGTPRKYFFRKNLLRLTG

SEQ ID NO: 3119 - protein, 21 aa, Artificial Sequence
  Description of Artificial Sequence: Synthetic peptide
  MOD_RES (4)..(4): phosphorylated serine
ATWSGSEFEVFFRKNLLRLTG

SEQ ID NO: 3120 - protein, 20 aa, Artificial Sequence
  Description of Artificial Sequence: Synthetic peptide
  MOD_RES (4)..(4): phosphorylated threonine
ATYTPQAPKFFRKNLLRLTG

SEQ ID NO: 3121 - protein, 21 aa, Artificial Sequence
  Description of Artificial Sequence: Synthetic peptide
  MOD_RES (4)..(4): phosphorylated threonine
ATYTPQAPKYFFRKNLLRLTG

SEQ ID NO: 3122 - protein, 20 aa, Artificial Sequence
  Description of Artificial Sequence: Synthetic peptide
  MOD_RES (6)..(6): phosphorylated serine
AVIHQSLGLFFRKNLLRLTG

SEQ ID NO: 3123 - protein, 20 aa, Artificial Sequence
  Description of Artificial Sequence: Synthetic peptide
  MOD_RES (6)..(6): phosphorylated serine
AVIHQSLGVFFRKNLLRLTG

SEQ ID NO: 3124 - protein, 20 aa, Artificial Sequence
  Description of Artificial Sequence: Synthetic peptide
  MOD_RES (8)..(8): phosphorylated serine
AVRPTRLSLFFRKNLLRLTG

SEQ ID NO: 3125 - protein, 22 aa, Artificial Sequence
  Description of Artificial Sequence: Synthetic peptide
  MOD_RES (4)..(4): phosphorylated serine
AVVSPPALHNAFFRKNLLRLTG

SEQ ID NO: 3126 - protein, 22 aa, Artificial Sequence
  Description of Artificial Sequence: Synthetic peptide
  MOD_RES (4)..(4): phosphorylated serine
AVVSPPALHNVFFRKNLLRLTG

SEQ ID NO: 3127 - protein, 23 aa, Artificial Sequence
  Description of Artificial Sequence: Synthetic peptide
  MOD_RES (6)..(6): phosphorylated serine
AYEKLSAEQSPPFFRKNLLRLTG

SEQ ID NO: 3128 - protein, 20 aa, Artificial Sequence
  Description of Artificial Sequence: Synthetic peptide
  MOD_RES (5)..(5): phosphorylated serine
DAKKSPLALFFRKNLLRLTG

SEQ ID NO: 3129 - protein, 25 aa, Artificial Sequence
  Description of Artificial Sequence: Synthetic peptide
  MOD_RES (8)..(8): phosphorylated serine
DDDWTHLSSKEVDPFFRKNLLRLTG

SEQ ID NO: 3130 - protein, 26 aa, Artificial Sequence
  Description of Artificial Sequence: Synthetic peptide
  MOD_RES (8)..(8): phosphorylated serine
DDDWTHLSSKEVDPSFFRKNLLRLTG

SEQ ID NO: 3131 - protein, 27 aa, Artificial Sequence
  Description of Artificial Sequence: Synthetic peptide
  MOD_RES (8)..(8): phosphorylated serine
DDDWTHLSSKEVDPSTFFRKNLLRLTG

SEQ ID NO: 3132 - protein, 28 aa, Artificial Sequence
  Description of Artificial Sequence: Synthetic peptide
  MOD_RES (8)..(8): phosphorylated serine
DDDWTHLSSKEVDPSTGFFRKNLLRLTG

SEQ ID NO: 3133 - protein, 25 aa, Artificial Sequence
  Description of Artificial Sequence: Synthetic peptide
  MOD_RES (7)..(7): phosphorylated serine
DDWTHLSSKEVDPSFFRKNLLRLTG

SEQ ID NO: 3134 - protein, 20 aa, Artificial Sequence
  Description of Artificial Sequence: Synthetic peptide
  MOD_RES (8)..(8): phosphorylated threonine
DEFERIKTFFFRKNLLRLTG

SEQ ID NO: 3135 - protein, 20 aa, Artificial Sequence
  Description of Artificial Sequence: Synthetic peptide
  MOD_RES (8)..(8): phosphorylated threonine
DEFERIKTWFFRKNLLRLTG

SEQ ID NO: 3136 - protein, 20 aa, Artificial Sequence
  Description of Artificial Sequence: Synthetic peptide
  MOD_RES (8)..(8): phosphorylated threonine
DEFERIKTYFFRKNLLRLTG

SEQ ID NO: 3137 - protein, 20 aa, Artificial Sequence
  Description of Artificial Sequence: Synthetic peptide
  MOD_RES (8)..(8): phosphorylated serine
DEISHRASFFFRKNLLRLTG

SEQ ID NO: 3138 - protein, 20 aa, Artificial Sequence
  Description of Artificial Sequence: Synthetic peptide
  MOD_RES (8)..(8): phosphorylated serine
DEISHRASWFFRKNLLRLTG

SEQ ID NO: 3139 - protein, 20 aa, Artificial Sequence
  Description of Artificial Sequence: Synthetic peptide
  MOD_RES (8)..(8): phosphorylated serine
DEISHRASYFFRKNLLRLTG

SEQ ID NO: 3140 - protein, 20 aa, Artificial Sequence
  Description of Artificial Sequence: Synthetic peptide
  MOD_RES (8)..(8): phosphorylated serine
DERLRINSFFFRKNLLRLTG

SEQ ID NO: 3141 - protein, 20 aa, Artificial Sequence
  Description of Artificial Sequence: Synthetic peptide
  MOD_RES (8)..(8): phosphorylated serine
DERLRINSLFFRKNLLRLTG

SEQ ID NO: 3142 - protein, 20 aa, Artificial Sequence
  Description of Artificial Sequence: Synthetic peptide
  MOD_RES (8)..(8): phosphorylated serine
DERLRINSWFFRKNLLRLTG

SEQ ID NO: 3143 - protein, 20 aa, Artificial Sequence
  Description of Artificial Sequence: Synthetic peptide
  MOD_RES (8)..(8): phosphorylated serine
DERLRINSYFFRKNLLRLTG

SEQ ID NO: 3144 - protein, 26 aa, Artificial Sequence
  Description of Artificial Sequence: Synthetic peptide
  MOD_RES (4)..(4): phosphorylated serine
DKLSVIAEDSESGKQFFRKNLLRLTG

SEQ ID NO: 3145 - protein, 27 aa, Artificial Sequence
  Description of Artificial Sequence: Synthetic peptide
  MOD_RES (4)..(4): phosphorylated serine
DKLSVIAEDSESGKQNFFRKNLLRLTG

SEQ ID NO: 3146 - protein, 28 aa, Artificial Sequence
  Description of Artificial Sequence: Synthetic peptide
  MOD_RES (4)..(4): phosphorylated serine
DKLSVIAEDSESGKQNPFFRKNLLRLTG

SEQ ID NO: 3147 - protein, 29 aa, Artificial Sequence
  Description of Artificial Sequence: Synthetic peptide
  MOD_RES (4)..(4): phosphorylated serine
DKLSVIAEDSESGKQNPGFFRKNLLRLTG

SEQ ID NO: 3148 - protein, 31 aa, Artificial Sequence
  Description of Artificial Sequence: Synthetic polypeptide
  MOD_RES (4)..(4): phosphorylated serine
DKLSVIAEDSESGKQNPGDSFFRKNLLRLTG

SEQ ID NO: 3149 - protein, 20 aa, Artificial Sequence
  Description of Artificial Sequence: Synthetic peptide
  MOD_RES (6)..(6): phosphorylated serine
  MOD_RES (7)..(7): oxidized methionine
DLKRRSMSIFFRKNLLRLTG

SEQ ID NO: 3150 - protein, 20 aa, Artificial Sequence
  Description of Artificial Sequence: Synthetic peptide
  MOD_RES (6)..(6): phosphorylated serine
DLKRRSMSIFFRKNLLRLTG

SEQ ID NO: 3151 - protein, 20 aa, Artificial Sequence
  Description of Artificial Sequence: Synthetic peptide
  MOD_RES (8)..(8): phosphorylated serine
DLKSSKASLFFRKNLLRLTG

SEQ ID NO: 3152 - protein, 20 aa, Artificial Sequence
  Description of Artificial Sequence: Synthetic peptide
  MOD_RES (4)..(4): phosphorylated threonine
DLRTVEKELFFRKNLLRLTG

SEQ ID NO: 3153 - protein, 19 aa, Artificial Sequence
  Description of Artificial Sequence: Synthetic peptide
  MOD_RES (3)..(3): phosphorylated serine
DLSEEKFLFFRKNLLRLTG

SEQ ID NO: 3154 - protein, 19 aa, Artificial Sequence
  Description of Artificial Sequence: Synthetic peptide
  MOD_RES (3)..(3): phosphorylated serine
DLSEEKFVFFRKNLLRLTG

SEQ ID NO: 3155 - protein, 21 aa, Artificial Sequence
  Description of Artificial Sequence: Synthetic peptide
  MOD_RES (6)..(6): phosphorylated serine
DLVPLSPLKKFFRKNLLRLTG

SEQ ID NO: 3156 - protein, 21 aa, Artificial Sequence
  Description of Artificial Sequence: Synthetic peptide
  MOD_RES (6)..(6): phosphorylated threonine
DLWKITKVMDFFRKNLLRLTG

SEQ ID NO: 3157 - protein, 21 aa, Artificial Sequence
  Description of Artificial Sequence: Synthetic peptide
  MOD_RES (6)..(6): phosphorylated serine
DMVPLSPLKKFFRKNLLRLTG

SEQ ID NO: 3158 - protein, 29 aa, Artificial Sequence
  Description of Artificial Sequence: Synthetic peptide
  MOD_RES (10)..(10): phosphorylated threonine
DPTRRFFKVTPPPGSGPQFFRKNLLRLTG

SEQ ID NO: 3159 - protein, 20 aa, Artificial Sequence
  Description of Artificial Sequence: Synthetic peptide
  MOD_RES (8)..(8): phosphorylated threonine
DQFERIKTLFFRKNLLRLTG

SEQ ID NO: 3160 - protein, 20 aa, Artificial Sequence
  Description of Artificial Sequence: Synthetic peptide
  MOD_RES (8)..(8): phosphorylated serine
DQISHRASLFFRKNLLRLTG

SEQ ID NO: 3161 - protein, 21 aa, Artificial Sequence
  Description of Artificial Sequence: Synthetic peptide
  MOD_RES (6)..(6): phosphorylated serine
DSDPLSPLKYFFRKNLLRLTG

SEQ ID NO: 3162 - protein, 21 aa, Artificial Sequence
  Description of Artificial Sequence: Synthetic peptide
  MOD_RES (6)..(6): phosphorylated serine
DSEPLSPLKYFFRKNLLRLTG

SEQ ID NO: 3163 - protein, 19 aa, Artificial Sequence
  Description of Artificial Sequence: Synthetic peptide
  MOD_RES (3)..(3): phosphorylated serine
DSSEEKFLFFRKNLLRLTG

SEQ ID NO: 3164 - protein, 19 aa, Artificial Sequence
  Description of Artificial Sequence: Synthetic peptide
  MOD_RES (3)..(3): phosphorylated serine
DSSEEKFVFFRKNLLRLTG

SEQ ID NO: 3165 - protein, 21 aa, Artificial Sequence
  Description of Artificial Sequence: Synthetic peptide
  MOD_RES (6)..(6): phosphorylated serine
DSVPLSPLKYFFRKNLLRLTG

SEQ ID NO: 3166 - protein, 21 aa, Artificial Sequence
  Description of Artificial Sequence: Synthetic peptide
  MOD_RES (6)..(6): phosphorylated serine
DTDPLSPLKYFFRKNLLRLTG

SEQ ID NO: 3167 - protein, 21 aa, Artificial Sequence
  Description of Artificial Sequence: Synthetic peptide
  MOD_RES (6)..(6): phosphorylated serine
DTEPLSPLKYFFRKNLLRLTG

SEQ ID NO: 3168 - protein, 21 aa, Artificial Sequence
  Description of Artificial Sequence: Synthetic peptide
  MOD_RES (6)..(6): phosphorylated serine
DTVPLSPLKYFFRKNLLRLTG

SEQ ID NO: 3169 - protein, 24 aa, Artificial Sequence
  Description of Artificial Sequence: Synthetic peptide
  MOD_RES (6)..(6): phosphorylated serine
DWTHLSSKEVDPSFFRKNLLRLTG

SEQ ID NO: 3170 - protein, 26 aa, Artificial Sequence
  Description of Artificial Sequence: Synthetic peptide
  MOD_RES (6)..(6): phosphorylated serine
DWTHLSSKEVDPSTGFFRKNLLRLTG

SEQ ID NO: 3171 - protein, 30 aa, Artificial Sequence
  Description of Artificial Sequence: Synthetic polypeptide
  MOD_RES (4)..(4): phosphorylated serine
EEGSPTMVEKGLEPGVFTLFFRKNLLRLTG

SEQ ID NO: 3172 - protein, 20 aa, Artificial Sequence
  Description of Artificial Sequence: Synthetic peptide
  MOD_RES (4)..(4): phosphorylated serine
EELSPTAKFFFRKNLLRLTG

SEQ ID NO: 3173 - protein, 20 aa, Artificial Sequence
  Description of Artificial Sequence: Synthetic peptide
  MOD_RES (4)..(4): phosphorylated serine
EELSPTKAFFFRKNLLRLTG

SEQ ID NO: 3174 - protein, 35 aa, Artificial Sequence
  Description of Artificial Sequence: Synthetic polypeptide
  MOD_RES (10)..(10): phosphorylated serine
EEMPENALPSDEDDKDPNDPYRALFFRKNLLRLTG

SEQ ID NO: 3175 - protein, 20 aa, Artificial Sequence
  Description of Artificial Sequence: Synthetic peptide
  MOD_RES (5)..(5): phosphorylated serine
EERRSPPAPFFRKNLLRLTG

SEQ ID NO: 3176 - protein, 21 aa, Artificial Sequence
  Description of Artificial Sequence: Synthetic peptide
  MOD_RES (3)..(3): phosphorylated serine
EESSDDGKKFFFRKNLLRLTG

SEQ ID NO: 3177 - protein, 21 aa, Artificial Sequence
  Description of Artificial Sequence: Synthetic peptide
  MOD_RES (4)..(4): phosphorylated serine
EESSDDGKKFFFRKNLLRLTG

SEQ ID NO: 3178 - protein, 21 aa, Artificial Sequence
  Description of Artificial Sequence: Synthetic peptide
  MOD_RES (3)..(3): phosphorylated serine
EESSDDGKKWFFRKNLLRLTG

SEQ ID NO: 3179 - protein, 21 aa, Artificial Sequence
  Description of Artificial Sequence: Synthetic peptide
  MOD_RES (4)..(4): phosphorylated serine
EESSDDGKKWFFRKNLLRLTG

SEQ ID NO: 3180 - protein, 21 aa, Artificial Sequence
  Description of Artificial Sequence: Synthetic peptide
  MOD_RES (3)..(3): phosphorylated serine
EESSDDGKKYFFRKNLLRLTG

SEQ ID NO: 3181 - protein, 21 aa, Artificial Sequence
  Description of Artificial Sequence: Synthetic peptide
  MOD_RES (4)..(4): phosphorylated serine
EESSDDGKKYFFRKNLLRLTG

SEQ ID NO: 3182 - protein, 34 aa, Artificial Sequence
  Description of Artificial Sequence: Synthetic polypeptide
  MOD_RES (9)..(9): phosphorylated serine
EGEEPTVYSDEEEPKDESARKNDFFRKNLLRLTG

SEQ ID NO: 3183 - protein, 29 aa, Artificial Sequence
  Description of Artificial Sequence: Synthetic peptide
  MOD_RES (3)..(3): phosphorylated serine
EGSPTMVEKGLEPGVFTLFFRKNLLRLTG

SEQ ID NO: 3184 - protein, 20 aa, Artificial Sequence
  Description of Artificial Sequence: Synthetic peptide
  MOD_RES (5)..(5): phosphorylated serine
ELFSSPPAVFFRKNLLRLTG

SEQ ID NO: 3185 - protein, 21 aa, Artificial Sequence
  Description of Artificial Sequence: Synthetic peptide
  MOD_RES (5)..(5): phosphorylated serine
ELKKSPTSLKFFRKNLLRLTG

SEQ ID NO: 3186 - protein, 21 aa, Artificial Sequence
  Description of Artificial Sequence: Synthetic peptide
  MOD_RES (5)..(5): phosphorylated serine
ELKKSPTSLYFFRKNLLRLTG

SEQ ID NO: 3187 - protein, 23 aa, Artificial Sequence
  Description of Artificial Sequence: Synthetic peptide
  MOD_RES (9)..(9): phosphorylated serine
ELLMPHRISSHFFFRKNLLRLTG

SEQ ID NO: 3188 - protein, 24 aa, Artificial Sequence
  Description of Artificial Sequence: Synthetic peptide
  MOD_RES (9)..(9): phosphorylated serine
ELLMPHRISSHFLFFRKNLLRLTG

SEQ ID NO: 3189 - protein, 21 aa, Artificial Sequence
  Description of Artificial Sequence: Synthetic peptide
  MOD_RES (7)..(7): phosphorylated serine
ELRISGSVQLFFRKNLLRLTG

SEQ ID NO: 3190 - protein, 21 aa, Artificial Sequence
  Description of Artificial Sequence: Synthetic peptide
  MOD_RES (5)..(5): phosphorylated serine
EMKKSPTSLKFFRKNLLRLTG

SEQ ID NO: 3191 - protein, 32 aa, Artificial Sequence
  Description of Artificial Sequence: Synthetic polypeptide
  MOD_RES (4)..(4): phosphorylated serine
  MOD_RES (8)..(8): phosphorylated serine
  MOD_RES (13)..(13): phosphorylated serine
EPASPAASISRLSGEQVDGKGFFRKNLLRLTG

SEQ ID NO: 3192 - protein, 32 aa, Artificial Sequence; identical to SEQ ID NO: 3191
  Description of Artificial Sequence: Synthetic polypeptide
  MOD_RES (4)..(4): phosphorylated serine
  MOD_RES (8)..(8): phosphorylated serine

SEQ ID NO: 3193 - protein, 20 aa, Artificial Sequence
  Description of Artificial Sequence: Synthetic peptide
  MOD_RES (6)..(6): phosphorylated serine
EPKRRSARFFFRKNLLRLTG

SEQ ID NO: 3194 - protein, 20 aa, Artificial Sequence
  Description of Artificial Sequence: Synthetic peptide
  MOD_RES (6)..(6): phosphorylated serine
EPKRRSARLFFRKNLLRLTG

SEQ ID NO: 3195 - protein, 20 aa, Artificial Sequence
  Description of Artificial Sequence: Synthetic peptide
  MOD_RES (6)..(6): phosphorylated serine
EPKRRSARMFFRKNLLRLTG

SEQ ID NO: 3196 - protein, 20 aa, Artificial Sequence
  Description of Artificial Sequence: Synthetic peptide
  MOD_RES (6)..(6): phosphorylated serine
EPKRRSARVFFRKNLLRLTG

SEQ ID NO: 3197 - protein, 20 aa, Artificial Sequence
  Description of Artificial Sequence: Synthetic peptide
  MOD_RES (4)..(4): phosphorylated serine
EPRSPSHSFFFRKNLLRLTG

SEQ ID NO: 3198 - protein, 20 aa, Artificial Sequence
  Description of Artificial Sequence: Synthetic peptide
  MOD_RES (4)..(4): phosphorylated serine
EPRSPSHSLFFRKNLLRLTG

SEQ ID NO: 3199 - protein, 20 aa, Artificial Sequence
  Description of Artificial Sequence: Synthetic peptide
  MOD_RES (4)..(4): phosphorylated serine
EPRSPSHSMFFRKNLLRLTG

SEQ ID NO: 3200 - protein, 20 aa, Artificial Sequence
  Description of Artificial Sequence: Synthetic peptide
  MOD_RES (4)..(4): phosphorylated serine
EPRSPSHSVFFRKNLLRLTG

SEQ ID NO: 3201 - protein, 26 aa, Artificial Sequence
  Description of Artificial Sequence: Synthetic peptide
  MOD_RES (3)..(3): phosphorylated serine
ERSPLLSQETAGQKPFFRKNLLRLTG

SEQ ID NO: 3202 - protein, 27 aa, Artificial Sequence
  Description of Artificial Sequence: Synthetic peptide
  MOD_RES (3)..(3): phosphorylated serine
ERSPLLSQETAGQKPLFFRKNLLRLTG

SEQ ID NO: 3203 - protein, 19 aa, Artificial Sequence
  Description of Artificial Sequence: Synthetic peptide
  MOD_RES (4)..(4): phosphorylated serine
ESDSLPRYFFRKNLLRLTG

SEQ ID NO: 3204 - protein, 19 aa, Artificial Sequence
  Description of Artificial Sequence: Synthetic peptide
  MOD_RES (4)..(4): phosphorylated serine
ESESLPRYFFRKNLLRLTG

SEQ ID NO: 3205 - protein, 24 aa, Artificial Sequence
  Description of Artificial Sequence: Synthetic peptide
  MOD_RES (3)..(3): phosphorylated serine
ESSVRSQEDQLSRFFRKNLLRLTG

SEQ ID NO: 3206 - protein, 25 aa, Artificial Sequence
  Description of Artificial Sequence: Synthetic peptide
  MOD_RES (3)..(3): phosphorylated serine
ESSVRSQEDQLSRRFFRKNLLRLTG

SEQ ID NO: 3207 - protein, 19 aa, Artificial Sequence
  Description of Artificial Sequence: Synthetic peptide
  MOD_RES (4)..(4): phosphorylated serine
ETDSLPRYFFRKNLLRLTG

SEQ ID NO: 3208 - protein, 19 aa, Artificial Sequence
  Description of Artificial Sequence: Synthetic peptide
  MOD_RES (4)..(4): phosphorylated serine
ETESLPRYFFRKNLLRLTG

SEQ ID NO: 3209 - protein, 24 aa, Artificial Sequence
  Description of Artificial Sequence: Synthetic peptide
  MOD_RES (9)..(9): phosphorylated serine
FDKHTLGDSDNESFFRKNLLRLTG

SEQ ID NO: 3210 - protein, 21 aa, Artificial Sequence
  Description of Artificial Sequence: Synthetic peptide
  MOD_RES (6)..(6): phosphorylated serine
FEDDDSNEKLFFRKNLLRLTG

SEQ ID NO: 3211 - protein, 19 aa, Artificial Sequence
  Description of Artificial Sequence: Synthetic peptide
  MOD_RES (4)..(4): phosphorylated serine
FIESPSKLFFRKNLLRLTG

SEQ ID NO: 3212 - protein, 19 aa, Artificial Sequence
  Description of Artificial Sequence: Synthetic peptide
  MOD_RES (4)..(4): phosphorylated serine
FIESPSKYFFRKNLLRLTG

SEQ ID NO: 3213 - protein, 22 aa, Artificial Sequence
  Description of Artificial Sequence: Synthetic peptide
  MOD_RES (4)..(4): phosphorylated serine
FIGSPTTPAGLFFRKNLLRLTG

SEQ ID NO: 3214 - protein, 23 aa, Artificial Sequence
  Description of Artificial Sequence: Synthetic peptide
  MOD_RES (8)..(8): phosphorylated serine
FKMPQEKSPGYSFFRKNLLRLTG

SEQ ID NO: 3215 - protein, 20 aa, Artificial Sequence
  Description of Artificial Sequence: Synthetic peptide
  MOD_RES (3)..(3): phosphorylated serine
FKSPVKTIRFFRKNLLRLTG

SEQ ID NO: 3216 - protein, 19 aa, Artificial Sequence
  Description of Artificial Sequence: Synthetic peptide
  MOD_RES (3)..(3): phosphorylated threonine
FKTQPVTFFFRKNLLRLTG

SEQ ID NO: 3217 - protein, 20 aa, Artificial Sequence
  Description of Artificial Sequence: Synthetic peptide
  MOD_RES (5)..(5): phosphorylated serine
FLDNSFEKVFFRKNLLRLTG

SEQ ID NO: 3218 - protein, 22 aa, Artificial Sequence
  Description of Artificial Sequence: Synthetic peptide
  MOD_RES (7)..(7): phosphorylated threonine
FLDRPPTPLFIFFRKNLLRLTG

SEQ ID NO: 3219 - protein, 20 aa, Artificial Sequence
  Description of Artificial Sequence: Synthetic peptide
  MOD_RES (4)..(4): phosphorylated serine
FLDSLRDLIFFRKNLLRLTG

SEQ ID NO: 3220 - protein, 20 aa, Artificial Sequence
  Description of Artificial Sequence: Synthetic peptide
  MOD_RES (4)..(4): phosphorylated threonine
FLDTPIAKVFFRKNLLRLTG

SEQ ID NO: 3221 - protein, 23 aa, Artificial Sequence
  Description of Artificial Sequence: Synthetic peptide
  MOD_RES (8)..(8): phosphorylated serine
FLFDKPVSPLLLFFRKNLLRLTG

SEQ ID NO: 3222 - protein, 20 aa, Artificial Sequence
  Description of Artificial Sequence: Synthetic peptide
  MOD_RES (8)..(8): phosphorylated serine
FLGVRPKSAFFRKNLLRLTG

SEQ ID NO: 3223 - protein, 21 aa, Artificial Sequence
  Description of Artificial Sequence: Synthetic peptide
  MOD_RES (6)..(6): phosphorylated threonine
FLIIRTVLQLFFRKNLLRLTG

SEQ ID NO: 3224 - protein, 25 aa, Artificial Sequence
  Description of Artificial Sequence: Synthetic peptide
  MOD_RES (10)..(10): phosphorylated serine
FLITGGGKGSGFSLFFRKNLLRLTG

SEQ ID NO: 3225 - protein, 21 aa, Artificial Sequence
  Description of Artificial Sequence: Synthetic peptide
  MOD_RES (4)..(4): phosphorylated serine
FLLSQNFDDEFFRKNLLRLTG

SEQ ID NO: 3226 - protein, 20 aa, Artificial Sequence
  Description of Artificial Sequence: Synthetic peptide
  MOD_RES (4)..(4): phosphorylated serine
FLYSGKETKFFRKNLLRLTG

SEQ ID NO: 3227 - protein, 20 aa, Artificial Sequence
  Description of Artificial Sequence: Synthetic peptide
  MOD_RES (4)..(4): phosphorylated serine
FLYSGKETYFFRKNLLRLTG

SEQ ID NO: 3228 - protein, 20 aa, Artificial Sequence
  Description of Artificial Sequence: Synthetic peptide
  MOD_RES (4)..(4): phosphorylated serine
FPHSLLSVFFFRKNLLRLTG

SEQ ID NO: 3229 - protein, 20 aa, Artificial Sequence
  Description of Artificial Sequence: Synthetic peptide
  MOD_RES (4)..(4): phosphorylated serine
FPHSLLSVIFFRKNLLRLTG

SEQ ID NO: 3230 - protein, 20 aa, Artificial Sequence
  Description of Artificial Sequence: Synthetic peptide
  MOD_RES (4)..(4): phosphorylated serine
FPHSLLSVLFFRKNLLRLTG

SEQ ID NO: 3231 - protein, 20 aa, Artificial Sequence
  Description of Artificial Sequence: Synthetic peptide
  MOD_RES (4)..(4): phosphorylated serine
FPHSLLSVMFFRKNLLRLTG

SEQ ID NO: 3232 - protein, 20 aa, Artificial Sequence
  Description of Artificial Sequence: Synthetic peptide
  MOD_RES (4)..(4): phosphorylated serine
FPHSLLSVVFFRKNLLRLTG

SEQ ID NO: 3233 - protein, 19 aa, Artificial Sequence
  Description of Artificial Sequence: Synthetic peptide
  MOD_RES (4)..(4): phosphorylated serine
FPISPVRFFFRKNLLRLTG

SEQ ID NO: 3234 - protein, 19 aa, Artificial Sequence
  Description of Artificial Sequence: Synthetic peptide
  MOD_RES (4)..(4): phosphorylated serine
FPISPVRLFFRKNLLRLTG

SEQ ID NO: 3235 - protein, 19 aa, Artificial Sequence
  Description of Artificial Sequence: Synthetic peptide
  MOD_RES (4)..(4): phosphorylated serine
FPISPVRMFFRKNLLRLTG

SEQ ID NO: 3236 - protein, 19 aa, Artificial Sequence
  Description of Artificial Sequence: Synthetic peptide
  MOD_RES (4)..(4): phosphorylated serine
FPISPVRVFFRKNLLRLTG

SEQ ID NO: 3237 - protein, 22 aa, Artificial Sequence
  Description of Artificial Sequence: Synthetic peptide
  MOD_RES (5)..(5): phosphorylated serine
FPLDSPKTLVLFFRKNLLRLTG

SEQ ID NO: 3238 - protein, 20 aa, Artificial Sequence
  Description of Artificial Sequence: Synthetic peptide
  MOD_RES (6)..(6): phosphorylated serine
FPRRHSVTLFFRKNLLRLTG

SEQ ID NO: 3239 - protein, 21 aa, Artificial Sequence
  Description of Artificial Sequence: Synthetic peptide
  MOD_RES (4)..(4): phosphorylated serine
FPRSPTKSSFFFRKNLLRLTG

SEQ ID NO: 3240 - protein, 21 aa, Artificial Sequence
  Description of Artificial Sequence: Synthetic peptide
  MOD_RES (4)..(4): phosphorylated serine
FPRSPTKSSLFFRKNLLRLTG

SEQ ID NO: 3241 - protein, 23 aa, Artificial Sequence
  Description of Artificial Sequence: Synthetic peptide
  MOD_RES (4)..(4): phosphorylated serine
FPRSPTKSSLDFFFRKNLLRLTG

SEQ ID NO: 3242 - protein, 23 aa, Artificial Sequence
  Description of Artificial Sequence: Synthetic peptide
  MOD_RES (4)..(4): phosphorylated serine
FPRSPTKSSLDLFFRKNLLRLTG

SEQ ID NO: 3243 - protein, 23 aa, Artificial Sequence
  Description of Artificial Sequence: Synthetic peptide
  MOD_RES (4)..(4): phosphorylated serine
FPRSPTKSSLDMFFRKNLLRLTG

SEQ ID NO: 3244 - protein, 23 aa, Artificial Sequence
  Description of Artificial Sequence: Synthetic peptide
  MOD_RES (4)..(4): phosphorylated serine
FPRSPTKSSLDVFFRKNLLRLTG

SEQ ID NO: 3245 - protein, 21 aa, Artificial Sequence
  Description of Artificial Sequence: Synthetic peptide
  MOD_RES (4)..(4): phosphorylated serine
FPRSPTKSSMFFRKNLLRLTG

SEQ ID NO: 3246 - protein, 21 aa, Artificial Sequence
  Description of Artificial Sequence: Synthetic peptide
  MOD_RES (4)..(4): phosphorylated serine
FPRSPTKSSVFFRKNLLRLTG

SEQ ID NO: 3247 - protein, 20 aa, Artificial Sequence
  Description of Artificial Sequence: Synthetic peptide
  MOD_RES (4)..(4): phosphorylated serine
FRFSGRTEYFFRKNLLRLTG

SEQ ID NO: 3248 - protein, 20 aa, Artificial Sequence
  Description of Artificial Sequence: Synthetic peptide
  MOD_RES (7)..(7): phosphorylated serine
FRGRYRSPYFFRKNLLRLTG

SEQ ID NO: 3249 - protein, 20 aa, Artificial Sequence
  Description of Artificial Sequence: Synthetic peptide
  MOD_RES (4)..(4): phosphorylated serine
FRKSMVEHYFFRKNLLRLTG

SEQ ID NO: 3250 - protein, 23 aa, Artificial Sequence
  Description of Artificial Sequence: Synthetic peptide
  MOD_RES (4)..(4): phosphorylated serine
FRRSPIKSSLDYFFRKNLLRLTG

SEQ ID NO: 3251 - protein, 21 aa, Artificial Sequence
  Description of Artificial Sequence: Synthetic peptide
  MOD_RES (4)..(4): phosphorylated serine
FRRSPTKSSFFFRKNLLRLTG

SEQ ID NO: 3252 - protein, 21 aa, Artificial Sequence
  Description of Artificial Sequence: Synthetic peptide
  MOD_RES (4)..(4): phosphorylated serine
FRRSPTKSSLFFRKNLLRLTG

SEQ ID NO: 3253 - protein, 22 aa, Artificial Sequence
  Description of Artificial Sequence: Synthetic peptide
  MOD_RES (4)..(4): phosphorylated serine
FRRSPTKSSLDFFRKNLLRLTG

SEQ ID NO: 3254 - protein, 23 aa, Artificial Sequence
  Description of Artificial Sequence: Synthetic peptide
  MOD_RES (4)..(4): phosphorylated serine
FRRSPTKSSLDFFFRKNLLRLTG

SEQ ID NO: 3255 - protein, 23 aa, Artificial Sequence
  Description of Artificial Sequence: Synthetic peptide
  MOD_RES (4)..(4): phosphorylated serine
FRRSPTKSSLDLFFRKNLLRLTG

SEQ ID NO: 3256 - protein, 23 aa, Artificial Sequence
  Description of Artificial Sequence: Synthetic peptide
  MOD_RES (4)..(4): phosphorylated serine
FRRSPTKSSLDMFFRKNLLRLTG

SEQ ID NO: 3257 - protein, 23 aa, Artificial Sequence
  Description of Artificial Sequence: Synthetic peptide
  MOD_RES (4)..(4): phosphorylated serine
FRRSPTKSSLDVFFRKNLLRLTG

SEQ ID NO: 3258 - protein, 23 aa, Artificial Sequence
  Description of Artificial Sequence: Synthetic peptide
  MOD_RES (4)..(4): phosphorylated serine
FRRSPTKSSLDYFFRKNLLRLTG

SEQ ID NO: 3259 - protein, 21 aa, Artificial Sequence
  Description of Artificial Sequence: Synthetic peptide
  MOD_RES (4)..(4): phosphorylated serine
FRRSPTKSSMFFRKNLLRLTG

SEQ ID NO: 3260 - protein, 21 aa, Artificial Sequence
  Description of Artificial Sequence: Synthetic peptide
  MOD_RES (4)..(4): phosphorylated serine
FRRSPTKSSVFFRKNLLRLTG

SEQ ID NO: 3261 - protein, 22 aa, Artificial Sequence
  Description of Artificial Sequence: Synthetic peptide
  MOD_RES (3)..(3): phosphorylated serine
FRSPTKSSLDFFFRKNLLRLTG

SEQ ID NO: 3262 - protein, 22 aa, Artificial Sequence
  Description of Artificial Sequence: Synthetic peptide
  MOD_RES (3)..(3): phosphorylated serine
FRSPTKSSLDLFFRKNLLRLTG

SEQ ID NO: 3263 - protein, 22 aa, Artificial Sequence
  Description of Artificial Sequence: Synthetic peptide
  MOD_RES (3)..(3): phosphorylated serine
FRSPTKSSLDMFFRKNLLRLTG

SEQ ID NO: 3264 - protein, 22 aa, Artificial Sequence
  Description of Artificial Sequence: Synthetic peptide
  MOD_RES (3)..(3): phosphorylated serine
FRSPTKSSLDVFFRKNLLRLTG

SEQ ID NO: 3265 - protein, 20 aa, Artificial Sequence
  Description of Artificial Sequence: Synthetic peptide
  MOD_RES (4)..(4): phosphorylated serine
FRYSGKTEFFFRKNLLRLTG

SEQ ID NO: 3266 - protein, 20 aa, Artificial Sequence
  Description of Artificial Sequence: Synthetic peptide
  MOD_RES (4)..(4): phosphorylated serine
FRYSGKTEKFFRKNLLRLTG

SEQ ID NO: 3267 - protein, 20 aa, Artificial Sequence
  Description of Artificial Sequence: Synthetic peptide
  MOD_RES (4)..(4): phosphorylated serine
FRYSGKTELFFRKNLLRLTG

SEQ ID NO: 3268 - protein, 20 aa, Artificial Sequence
  Description of Artificial Sequence: Synthetic peptide
  MOD_RES (4)..(4): phosphorylated serine
FRYSGKTEMFFRKNLLRLTG

SEQ ID NO: 3269 - protein, 20 aa, Artificial Sequence
  Description of Artificial Sequence: Synthetic peptide
  MOD_RES (4)..(4): phosphorylated serine
FRYSGKTERFFRKNLLRLTG

SEQ ID NO: 3270 - protein, 20 aa, Artificial Sequence
  Description of Artificial Sequence: Synthetic peptide
  MOD_RES (4)..(4): phosphorylated serine
FRYSGKTEYFFRKNLLRLTG

SEQ ID NO: 3271 - protein, 21 aa, Artificial Sequence
  Description of Artificial Sequence: Synthetic peptide
  MOD_RES (4)..(4): phosphorylated serine
FSDSHEGFSYFFRKNLLRLTG

SEQ ID NO: 3272 - protein, 21 aa, Artificial Sequence
  Description of Artificial Sequence: Synthetic peptide
  MOD_RES (4)..(4): phosphorylated serine
FSESHEGFSYFFRKNLLRLTG

SEQ ID NO: 3273 - protein, 19 aa, Artificial Sequence
  Description of Artificial Sequence: Synthetic peptide
  MOD_RES (4)..(4): phosphorylated serine
FSESPSKLFFRKNLLRLTG

SEQ ID NO: 3274 - protein, 19 aa, Artificial Sequence
  Description of Artificial Sequence: Synthetic peptide
  MOD_RES (4)..(4): phosphorylated serine
FSESPSKYFFRKNLLRLTG

SEQ ID NO: 3275 - protein, 19 aa, Artificial Sequence
  Description of Artificial Sequence: Synthetic peptide
  MOD_RES (4)..(4): phosphorylated serine
FSISPVRFFFRKNLLRLTG

SEQ ID NO: 3276 - protein, 19 aa, Artificial Sequence
  Description of Artificial Sequence: Synthetic peptide
  MOD_RES (4)..(4): phosphorylated serine
FSISPVRLFFRKNLLRLTG

SEQ ID NO: 3277 - protein, 19 aa, Artificial Sequence
  Description of Artificial Sequence: Synthetic peptide
  MOD_RES (4)..(4): phosphorylated serine
FSISPVRMFFRKNLLRLTG

SEQ ID NO: 3278 - protein, 19 aa, Artificial Sequence
  Description of Artificial Sequence: Synthetic peptide
  MOD_RES (4)..(4): phosphorylated serine
FSISPVRVFFRKNLLRLTG

SEQ ID NO: 3279 - protein, 21 aa, Artificial Sequence
  Description of Artificial Sequence: Synthetic peptide
  MOD_RES (3)..(3): phosphorylated serine
FSSSHEGFSYFFRKNLLRLTG

SEQ ID NO: 3280 - protein, 21 aa, Artificial Sequence
  Description of Artificial Sequence: Synthetic peptide
  MOD_RES (4)..(4): phosphorylated serine
FSSSHEGFSYFFRKNLLRLTG

SEQ ID NO: 3281 - protein, 21 aa, Artificial Sequence
  Description of Artificial Sequence: Synthetic peptide
  MOD_RES (4)..(4): phosphorylated serine
FTDSHEGFSYFFRKNLLRLTG

SEQ ID NO: 3282 - protein, 21 aa, Artificial Sequence
  Description of Artificial Sequence: Synthetic peptide
  MOD_RES (4)..(4): phosphorylated serine
FTESHEGFSYFFRKNLLRLTG

SEQ ID NO: 3283 - protein, 19 aa, Artificial Sequence
  Description of Artificial Sequence: Synthetic peptide
  MOD_RES (4)..(4): phosphorylated serine
FTESPSKLFFRKNLLRLTG

SEQ ID NO: 3284 - protein, 19 aa, Artificial Sequence
  Description of Artificial Sequence: Synthetic peptide
  MOD_RES (4)..(4): phosphorylated serine
FTESPSKYFFRKNLLRLTG

SEQ ID NO: 3285 - protein, 20 aa, Artificial Sequence
  Description of Artificial Sequence: Synthetic peptide
  MOD_RES (4)..(4): phosphorylated serine
FTKSPYQEFFFRKNLLRLTG

SEQ ID NO: 3286 - protein, 21 aa, Artificial Sequence
  Description of Artificial Sequence: Synthetic peptide
  MOD_RES (3)..(3): phosphorylated serine
FTSSHEGFSYFFRKNLLRLTG

SEQ ID NO: 3287 - protein, 24 aa, Artificial Sequence
  Description of Artificial Sequence: Synthetic peptide
  MOD_RES (9)..(9): phosphorylated serine
FVSKVMIGSPKKVFFRKNLLRLTG

SEQ ID NO: 3288 - protein, 22 aa, Artificial Sequence
  Description of Artificial Sequence: Synthetic peptide
  MOD_RES (4)..(4): phosphorylated serine
GALSPSLLHSLFFRKNLLRLTG

SEQ ID NO: 3289 - protein, 20 aa, Artificial Sequence
  Description of Artificial Sequence: Synthetic peptide
  MOD_RES (8)..(8): phosphorylated serine
GAQPGRHSFFFRKNLLRLTG

SEQ ID NO: 3290 - protein, 20 aa, Artificial Sequence
  Description of Artificial Sequence: Synthetic peptide
  MOD_RES (8)..(8): phosphorylated serine
GAQPGRHSLFFRKNLLRLTG

SEQ ID NO: 3291 - protein, 20 aa, Artificial Sequence
  Description of Artificial Sequence: Synthetic peptide
  MOD_RES (8)..(8): phosphorylated serine
GAQPGRHSVFFRKNLLRLTG

SEQ ID NO: 3292 - protein, 25 aa, Artificial Sequence
  Description of Artificial Sequence: Synthetic peptide
  MOD_RES (9)..(9): phosphorylated serine
GDDDWTHLSSKEVDFFRKNLLRLTG

SEQ ID NO: 3293 - protein, 26 aa, Artificial Sequence
  Description of Artificial Sequence: Synthetic peptide
  MOD_RES (9)..(9): phosphorylated serine
GDDDWTHLSSKEVDPFFRKNLLRLTG

SEQ ID NO: 3294 - protein, 27 aa, Artificial Sequence
  Description of Artificial Sequence: Synthetic peptide
  MOD_RES (9)..(9): phosphorylated serine
GDDDWTHLSSKEVDPSFFRKNLLRLTG

SEQ ID NO: 3295 - protein, 28 aa, Artificial Sequence
  Description of Artificial Sequence: Synthetic peptide
  MOD_RES (9)..(9): phosphorylated serine
GDDDWTHLSSKEVDPSTFFRKNLLRLTG

SEQ ID NO: 3296 - protein, 29 aa, Artificial Sequence
  Description of Artificial Sequence: Synthetic peptide
  MOD_RES (9)..(9): phosphorylated serine
GDDDWTHLSSKEVDPSTGFFRKNLLRLTG

SEQ ID NO: 3297 - protein, 20 aa, Artificial Sequence
  Description of Artificial Sequence: Synthetic peptide
  MOD_RES (4)..(4): phosphorylated serine
GEASPSHIIFFRKNLLRLTG

SEQ ID NO: 3298 - protein, 22 aa, Artificial Sequence
  Description of Artificial Sequence: Synthetic peptide
  MOD_RES (4)..(4): phosphorylated serine
GEESSDDGKKFFFRKNLLRLTG

SEQ ID NO: 3299 - protein, 22 aa, Artificial Sequence
  Description of Artificial Sequence: Synthetic peptide
  MOD_RES (4)..(4): phosphorylated serine
GEESSDDGKKWFFRKNLLRLTG

SEQ ID NO: 3300 - protein, 22 aa, Artificial Sequence
  Description of Artificial Sequence: Synthetic peptide
  MOD_RES (4)..(4): phosphorylated serine
GEESSDDGKKYFFRKNLLRLTG

SEQ ID NO: 3301 - protein, 23 aa, Artificial Sequence
  Description of Artificial Sequence: Synthetic peptide
  MOD_RES (4)..(4): phosphorylated serine
GEESSDIDGKKFFFRKNLLRLTG

SEQ ID NO: 3302 - protein, 20 aa, Artificial Sequence
  Description of Artificial Sequence: Synthetic peptide
  MOD_RES (4)..(4): phosphorylated serine
GEISPQREVFFRKNLLRLTG

SEQ ID NO: 3303 - protein, 27 aa, Artificial Sequence
  Description of Artificial Sequence: Synthetic peptide
  MOD_RES (4)..(4): phosphorylated serine
GERSPLLSQETAGQKPFFRKNLLRLTG

SEQ ID NO: 3304 - protein, 28 aa, Artificial Sequence
  Description of Artificial Sequence: Synthetic peptide
  MOD_RES (4)..(4): phosphorylated serine
GERSPLLSQETAGQKPLFFRKNLLRLTG

SEQ ID NO: 3305 - protein, 20 aa, Artificial Sequence
  Description of Artificial Sequence: Synthetic peptide
  MOD_RES (4)..(4): phosphorylated serine
GETSPRTKIFFRKNLLRLTG

SEQ ID NO: 3306 - protein, 28 aa, Artificial Sequence
  Description of Artificial Sequence: Synthetic peptide
  MOD_RES (10)..(10): phosphorylated serine
GGDDDWTHLSSKEVDPSFFRKNLLRLTG

SEQ ID NO: 3307 - protein, 30 aa, Artificial Sequence
  Description of Artificial Sequence: Synthetic polypeptide
  MOD_RES (10)..(10): phosphorylated serine
GGDDDWTHLSSKEVDPSTGFFRKNLLRLTG

SEQ ID NO: 3308 - protein, 23 aa, Artificial Sequence
  Description of Artificial Sequence: Synthetic peptide
  MOD_RES (11)..(11): phosphorylated serine
GGSFGGRSSGSPFFRKNLLRLTG

SEQ ID NO: 3309 - protein, 23 aa, Artificial Sequence
  Description of Artificial Sequence: Synthetic peptide
  MOD_RES (11)..(11): phosphorylated serine
GGSFGGRSSGSVFFRKNLLRLTG

SEQ ID NO: 3310 - protein, 20 aa, Artificial Sequence
  Description of Artificial Sequence: Synthetic peptide
  MOD_RES (4)..(4): phosphorylated serine
GIDSPSSSVFFRKNLLRLTG

SEQ ID NO: 3311 - protein, 20 aa, Artificial Sequence
  Description of Artificial Sequence: Synthetic peptide
  MOD_RES (4)..(4): phosphorylated serine
GIMSPLAKKFFRKNLLRLTG

SEQ ID NO: 3312 - protein, 20 aa, Artificial Sequence
  Description of Artificial Sequence: Synthetic peptide
  MOD_RES (5)..(5): phosphorylated threonine
GLAPTPPSMFFRKNLLRLTG

SEQ ID NO: 3313 - protein, 20 aa, Artificial Sequence
  Description of Artificial Sequence: Synthetic peptide
  MOD_RES (4)..(4): phosphorylated serine
GLDSGFHSVFFRKNLLRLTG

SEQ ID NO: 3314 - protein, 21 aa, Artificial Sequence
  Description of Artificial Sequence: Synthetic peptide
  MOD_RES (4)..(4): phosphorylated serine
GLDSLDQVEIFFRKNLLRLTG

SEQ ID NO: 3315 - protein, 20 aa, Artificial Sequence
  Description of Artificial Sequence: Synthetic peptide
  MOD_RES (8)..(8): phosphorylated serine
GLGELLRSLFFRKNLLRLTG

SEQ ID NO: 3316 - protein, 22 aa, Artificial Sequence
  Description of Artificial Sequence: Synthetic peptide
  MOD_RES (7)..(7): phosphorylated serine
GLIRSRSFIFKFFRKNLLRLTG

SEQ ID NO: 3317 - protein, 22 aa, Artificial Sequence
  Description of Artificial Sequence: Synthetic peptide
  MOD_RES (7)..(7): phosphorylated serine
GLIRSRSFIFYFFRKNLLRLTG

SEQ ID NO: 3318 - protein, 21 aa, Artificial Sequence
  Description of Artificial Sequence: Synthetic peptide
  MOD_RES (4)..(4): phosphorylated serine
GLISPELRHLFFRKNLLRLTG

SEQ ID NO: 3319 - protein, 20 aa, Artificial Sequence
  Description of Artificial Sequence: Synthetic peptide
  MOD_RES (4)..(4): phosphorylated serine
GLISPNVQLFFRKNLLRLTG

SEQ ID NO: 3320 - protein, 20 aa, Artificial Sequence
  Description of Artificial Sequence: Synthetic peptide
  MOD_RES (4)..(4): phosphorylated serine
GLISPVWGAFFRKNLLRLTG

SEQ ID NO: 3321 - protein, 22 aa, Artificial Sequence
  Description of Artificial Sequence: Synthetic peptide
  MOD_RES (4)..(4): phosphorylated threonine
GLITPGGFSSVFFRKNLLRLTG

SEQ ID NO: 3322 - protein, 20 aa, Artificial Sequence
  Description of Artificial Sequence: Synthetic peptide
  MOD_RES (5)..(5): phosphorylated serine
GLLDSPTSIFFRKNLLRLTG

SEQ ID NO: 3323 - protein, 20 aa, Artificial Sequence
  Description of Artificial Sequence: Synthetic peptide
  MOD_RES (5)..(5): phosphorylated serine
GLLGSPARLFFRKNLLRLTG

SEQ ID NO: 3324 - protein, 20 aa, Artificial Sequence
  Description of Artificial Sequence: Synthetic peptide
  MOD_RES (5)..(5): phosphorylated serine
GLLGSPVRAFFRKNLLRLTG

SEQ ID NO: 3325 - protein, 20 aa, Artificial Sequence
  Description of Artificial Sequence: Synthetic peptide
  MOD_RES (5)..(5): phosphorylated serine
GLLGSPVRVFFRKNLLRLTG

SEQ ID NO: 3326 - protein, 22 aa, Artificial Sequence
  Description of Artificial Sequence: Synthetic peptide
  MOD_RES (4)..(4): phosphorylated serine
GLLSPARLYAIFFRKNLLRLTG

SEQ ID NO: 3327 - protein, 22 aa, Artificial Sequence
  Description of Artificial Sequence: Synthetic peptide
  MOD_RES (4)..(4): phosphorylated serine
GLLSPARLYAVFFRKNLLRLTG

SEQ ID NO: 3328 - protein, 21 aa, Artificial Sequence
  Description of Artificial Sequence: Synthetic peptide
  MOD_RES (4)..(4): phosphorylated serine
GLLSPRFVDVFFRKNLLRLTG

SEQ ID NO: 3329 - protein, 20 aa, Artificial Sequence
  Description of Artificial Sequence: Synthetic peptide
  MOD_RES (4)..(4): phosphorylated serine
GLLSPRHSLFFRKNLLRLTG

SEQ ID NO: 3330 - protein, 23 aa, Artificial Sequence
  Description of Artificial Sequence: Synthetic peptide
  MOD_RES (11)..(11): phosphorylated serine
GLSFGGRSSGSPFFRKNLLRLTG

SEQ ID NO: 3331 - protein, 23 aa, Artificial Sequence
  Description of Artificial Sequence: Synthetic peptide
  MOD_RES (11)..(11): phosphorylated serine
GLSFGGRSSGSVFFRKNLLRLTG

SEQ ID NO: 3332 - protein, 20 aa, Artificial Sequence
  Description of Artificial Sequence: Synthetic peptide
  MOD_RES (5)..(5): phosphorylated serine
GMLGSPVRVFFRKNLLRLTG

SEQ ID NO: 3333 - protein, 22 aa, Artificial Sequence
  Description of Artificial Sequence: Synthetic peptide
  MOD_RES (4)..(4): phosphorylated serine
GMLSPARLYAIFFRKNLLRLTG

SEQ ID NO: 3334 - protein, 22 aa, Artificial Sequence
  Description of Artificial Sequence: Synthetic peptide
  MOD_RES (4)..(4): phosphorylated serine
GMLSPARLYAVFFRKNLLRLTG

SEQ ID NO: 3335 - protein, 22 aa, Artificial Sequence
  Description of Artificial Sequence: Synthetic peptide
  MOD_RES (4)..(4): phosphorylated serine
GMLSPGKSIEVFFRKNLLRLTG

SEQ ID NO: 3336 - protein, 22 aa, Artificial Sequence
  Description of Artificial Sequence: Synthetic peptide
  MOD_RES (10)..(10): phosphorylated serine
GPKPLFRRMSSFFRKNLLRLTG

SEQ ID NO: 3337 - protein, 23 aa, Artificial Sequence
  Description of Artificial Sequence: Synthetic peptide
  MOD_RES (10)..(10): phosphorylated serine
GPKPLFRRMSSLFFRKNLLRLTG

SEQ ID NO: 3338 - protein, 24 aa, Artificial Sequence
  Description of Artificial Sequence: Synthetic peptide
  MOD_RES (10)..(10): phosphorylated serine
GPKPLFRRMSSLVFFRKNLLRLTG

SEQ ID NO: 3339 - protein, 25 aa, Artificial Sequence
  Description of Artificial Sequence: Synthetic peptide
  MOD_RES (10)..(10): phosphorylated serine
GPKPLFRRMSSLVGFFRKNLLRLTG

SEQ ID NO: 3340 - protein, 26 aa, Artificial Sequence
  Description of Artificial Sequence: Synthetic peptide
  MOD_RES (10)..(10): phosphorylated serine
GPKPLFRRMSSLVGPFFRKNLLRLTG

SEQ ID NO: 3341 - protein, 27 aa, Artificial Sequence
  Description of Artificial Sequence: Synthetic peptide
  MOD_RES (10)..(10): phosphorylated serine
GPKPLFRRMSSLVGPTFFRKNLLRLTG

SEQ ID NO: 3342 - protein, 28 aa, Artificial Sequence
  Description of Artificial Sequence: Synthetic peptide
  MOD_RES (10)..(10): phosphorylated serine
GPKPLFRRMSSLVGPTQFFRKNLLRLTG

SEQ ID NO: 3343 - protein, 29 aa, Artificial Sequence
  Description of Artificial Sequence: Synthetic peptide
  MOD_RES (10)..(10): phosphorylated serine
GPKPLFRRMSSLVGPTQSFFRKNLLRLTG

SEQ ID NO: 3344 - protein, 21 aa, Artificial Sequence
  Description of Artificial Sequence: Synthetic peptide
  MOD_RES (9)..(9): phosphorylated serine
GPPYQRRGSLFFRKNLLRLTG

SEQ ID NO: 3345 - protein, 20 aa, Artificial Sequence
  Description of Artificial Sequence: Synthetic peptide
  MOD_RES (8)..(8): phosphorylated serine
GPQPGRHSFFFRKNLLRLTG

SEQ ID NO: 3346 - protein, 20 aa, Artificial Sequence
  Description of Artificial Sequence: Synthetic peptide
  MOD_RES (8)..(8): phosphorylated serine
GPQPGRHSLFFRKNLLRLTG

SEQ ID NO: 3347 - protein, 20 aa, Artificial Sequence
  Description of Artificial Sequence: Synthetic peptide
  MOD_RES (8)..(8): phosphorylated serine
GPQPGRHSVFFRKNLLRLTG

SEQ ID NO: 3348 - protein, 21 aa, Artificial Sequence
  Description of Artificial Sequence: Synthetic peptide
  MOD_RES (6)..(6): phosphorylated serine
GPRPGSPSAFFFRKNLLRLTG

SEQ ID NO: 3349 - protein, 21 aa, Artificial Sequence
  Description of Artificial Sequence: Synthetic peptide
  MOD_RES (6)..(6): phosphorylated serine
GPRPGSPSALFFRKNLLRLTG

SEQ ID NO: 3350 - protein, 21 aa, Artificial Sequence
  Description of Artificial Sequence: Synthetic peptide
  MOD_RES (6)..(6): phosphorylated serine
GPRPGSPSAMFFRKNLLRLTG

SEQ ID NO: 3351 - protein, 21 aa, Artificial Sequence
  Description of Artificial Sequence: Synthetic peptide
  MOD_RES (6)..(6): phosphorylated serine
GPRPGSPSAVFFRKNLLRLTG

SEQ ID NO: 3352 - protein, 19 aa, Artificial Sequence
  Description of Artificial Sequence: Synthetic peptide
  MOD_RES (6)..(6): phosphorylated serine
GPRSASLLFFRKNLLRLTG

SEQ ID NO: 3353 - protein, 21 aa, Artificial Sequence
  Description of Artificial Sequence: Synthetic peptide
  MOD_RES (4)..(4): phosphorylated serine
GPRSASLLSFFFRKNLLRLTG

SEQ ID NO: 3354 - protein, 21 aa, Artificial Sequence
  Description of Artificial Sequence: Synthetic peptide
  MOD_RES (6)..(6): phosphorylated serine
  MOD_RES (9)..(9): phosphorylated serine
GPRSASLLSFFFRKNLLRLTG

SEQ ID NO: 3355 - protein, 21 aa, Artificial Sequence
  Description of Artificial Sequence: Synthetic peptide
  MOD_RES (9)..(9): phosphorylated serine
GPRSASLLSFFFRKNLLRLTG

SEQ ID NO: 3356 - protein, 21 aa, Artificial Sequence
  Description of Artificial Sequence: Synthetic peptide
  MOD_RES (4)..(4): phosphorylated serine
  MOD_RES (6)..(6): phosphorylated serine
GPRSASLLSLFFRKNLLRLTG

SEQ ID NO: 3357 - protein, 21 aa, Artificial Sequence
  Description of Artificial Sequence: Synthetic peptide
  MOD_RES (4)..(4): phosphorylated serine
GPRSASLLSLFFRKNLLRLTG

SEQ ID NO: 3358 - protein, 21 aa, Artificial Sequence
  Description of Artificial Sequence: Synthetic peptide
  MOD_RES (6)..(6): phosphorylated serine
  MOD_RES (9)..(9): phosphorylated serine
GPRSASLLSLFFRKNLLRLTG

SEQ ID NO: 3359 - protein, 21 aa, Artificial Sequence
  Description of Artificial Sequence: Synthetic peptide
  MOD_RES (6)..(6): phosphorylated serine
GPRSASLLSLFFRKNLLRLTG

SEQ ID NO: 3360 - protein, 21 aa, Artificial Sequence
  Description of Artificial Sequence: Synthetic peptide
  MOD_RES (9)..(9): phosphorylated serine
GPRSASLLSLFFRKNLLRLTG

SEQ ID NO: 3361 - protein, 21 aa, Artificial Sequence
  Description of Artificial Sequence: Synthetic peptide
  MOD_RES (4)..(4): phosphorylated serine
GPRSASLLSMFFRKNLLRLTG

SEQ ID NO: 3362 - protein, 21 aa, Artificial Sequence
  Description of Artificial Sequence: Synthetic peptide
  MOD_RES (6)..(6): phosphorylated serine
  MOD_RES (9)..(9): phosphorylated serine
GPRSASLLSMFFRKNLLRLTG

SEQ ID NO: 3363 - protein, 21 aa, Artificial Sequence
  Description of Artificial Sequence: Synthetic peptide
  MOD_RES (9)..(9): phosphorylated serine
GPRSASLLSMFFRKNLLRLTG

SEQ ID NO: 3364 - protein, 21 aa, Artificial Sequence
  Description of Artificial Sequence: Synthetic peptide
  MOD_RES (4)..(4): phosphorylated serine
GPRSASLLSVFFRKNLLRLTG

SEQ ID NO: 3365 - protein, 21 aa, Artificial Sequence
  Description of Artificial Sequence: Synthetic peptide
  MOD_RES (6)..(6): phosphorylated serine
  MOD_RES (9)..(9): phosphorylated serine
GPRSASLLSVFFRKNLLRLTG

SEQ ID NO: 3366 - protein, 21 aa, Artificial Sequence
  Description of Artificial Sequence: Synthetic peptide
  MOD_RES (9)..(9): phosphorylated serine
GPRSASLLSVFFRKNLLRLTG

SEQ ID NO: 3367 - protein, 20 aa, Artificial Sequence
  Description of Artificial Sequence: Synthetic peptide
  MOD_RES (4)..(4): phosphorylated serine
GPRSPKAPPFFRKNLLRLTG

SEQ ID NO: 3368 - protein, 20 aa, Artificial Sequence
  Description of Artificial Sequence: Synthetic peptide
  MOD_RES (4)..(4): phosphorylated serine
GPRSPPVTLFFRKNLLRLTG

SEQ ID NO: 3369 - protein, 20 aa, Artificial Sequence
  Description of Artificial Sequence: Synthetic peptide
  MOD_RES (4)..(4): phosphorylated serine
GQLSPGVQFFFRKNLLRLTG

SEQ ID NO: 3370 - protein, 20 aa, Artificial Sequence
  Description of Artificial Sequence: Synthetic peptide
  MOD_RES (4)..(4): phosphorylated serine
GRKSPPPSFFFRKNLLRLTG

SEQ ID NO: 3371 - protein, 20 aa, Artificial Sequence
  Description of Artificial Sequence: Synthetic peptide
  MOD_RES (4)..(4): phosphorylated serine
GRKSPPPSKFFRKNLLRLTG

SEQ ID NO: 3372 - protein, 20 aa, Artificial Sequence
  Description of Artificial Sequence: Synthetic peptide
  MOD_RES (4)..(4): phosphorylated serine
GRKSPPPSLFFRKNLLRLTG

SEQ ID NO: 3373 - protein, 20 aa, Artificial Sequence
  Description of Artificial Sequence: Synthetic peptide
  MOD_RES (4)..(4): phosphorylated serine
GRKSPPPSMFFRKNLLRLTG

SEQ ID NO: 3374 - protein, 20 aa, Artificial Sequence
  Description of Artificial Sequence: Synthetic peptide
  MOD_RES (4)..(4): phosphorylated serine
GRKSPPPSRFFRKNLLRLTG

SEQ ID NO: 3375 - protein, 20 aa, Artificial Sequence
  Description of Artificial Sequence: Synthetic peptide
  MOD_RES (4)..(4): phosphorylated serine
GRKSPPPSYFFRKNLLRLTG

SEQ ID NO: 3376 - protein, 20 aa, Artificial Sequence
  Description of Artificial Sequence: Synthetic peptide
  MOD_RES (5)..(5): phosphorylated serine
GRLGSPHRFFFRKNLLRLTG

SEQ ID NO: 3377 - protein, 20 aa, Artificial Sequence
  Description of Artificial Sequence: Synthetic peptide
  MOD_RES (5)..(5): phosphorylated serine
GRLGSPHRKFFRKNLLRLTG

SEQ ID NO: 3378 - protein, 20 aa, Artificial Sequence
  Description of Artificial Sequence: Synthetic peptide
  MOD_RES (5)..(5): phosphorylated serine
GRLGSPHRLFFRKNLLRLTG

SEQ ID NO: 3379 - protein, 20 aa, Artificial Sequence
  Description of Artificial Sequence: Synthetic peptide
  MOD_RES (5)..(5): phosphorylated serine
GRLGSPHRMFFRKNLLRLTG

SEQ ID NO: 3380 - protein, 20 aa, Artificial Sequence
  Description of Artificial Sequence: Synthetic peptide
  MOD_RES (5)..(5): phosphorylated serine
GRLGSPHRRFFRKNLLRLTG

SEQ ID NO: 3381 - protein, 20 aa, Artificial Sequence
  Description of Artificial Sequence: Synthetic peptide
  MOD_RES (5)..(5): phosphorylated serine
GRLGSPHRYFFRKNLLRLTG

SEQ ID NO: 3382 - protein, 20 aa, Artificial Sequence
  Description of Artificial Sequence: Synthetic peptide
  MOD_RES (4)..(4): phosphorylated serine
GRLSPAYSLFFRKNLLRLTG

SEQ ID NO: 3383 - protein, 22 aa, Artificial Sequence
  Description of Artificial Sequence: Synthetic peptide
  MOD_RES (4)..(4): phosphorylated serine
GRLSPKASQVFFFRKNLLRLTG

SEQ ID NO: 3384 - protein, 22 aa, Artificial Sequence
  Description of Artificial Sequence: Synthetic peptide
  MOD_RES (4)..(4): phosphorylated serine
GRLSPKASQVKFFRKNLLRLTG

SEQ ID NO: 3385 - protein, 22 aa, Artificial Sequence
  Description of Artificial Sequence: Synthetic peptide
  MOD_RES (4)..(4): phosphorylated serine
GRLSPKASQVLFFRKNLLRLTG

SEQ ID NO: 3386 - protein, 22 aa, Artificial Sequence
  Description of Artificial Sequence: Synthetic peptide
  MOD_RES (4)..(4): phosphorylated serine
GRLSPKASQVMFFRKNLLRLTG

SEQ ID NO: 3387 - protein, 22 aa, Artificial Sequence
  Description of Artificial Sequence: Synthetic peptide
  MOD_RES (4)..(4): phosphorylated serine
GRLSPKASQVRFFRKNLLRLTG

SEQ ID NO: 3388 - protein, 22 aa, Artificial Sequence
  Description of Artificial Sequence: Synthetic peptide
  MOD_RES (4)..(4): phosphorylated serine
GRLSPKASQVYFFRKNLLRLTG

SEQ ID NO: 3389 - protein, 21 aa, Artificial Sequence
  Description of Artificial Sequence: Synthetic peptide
  MOD_RES (4)..(4): phosphorylated serine
GRLSPVPVPFFFRKNLLRLTG

SEQ ID NO: 3390 - protein, 21 aa, Artificial Sequence
  Description of Artificial Sequence: Synthetic peptide
  MOD_RES (4)..(4): phosphorylated serine
GRLSPVPVPKFFRKNLLRLTG

SEQ ID NO: 3391 - protein, 21 aa, Artificial Sequence
  Description of Artificial Sequence: Synthetic peptide
  MOD_RES (4)..(4): phosphorylated serine
GRLSPVPVPLFFRKNLLRLTG

SEQ ID NO: 3392 - protein, 21 aa, Artificial Sequence
  Description of Artificial Sequence: Synthetic peptide
  MOD_RES (4)..(4): phosphorylated serine
GRLSPVPVPMFFRKNLLRLTG

SEQ ID NO: 3393 - protein, 21 aa, Artificial Sequence
  Description of Artificial Sequence: Synthetic peptide
  MOD_RES (4)..(4): phosphorylated serine
GRLSPVPVPRFFRKNLLRLTG

SEQ ID NO: 3394 - protein, 21 aa, Artificial Sequence
  Description of Artificial Sequence: Synthetic peptide
  MOD_RES (4)..(4): phosphorylated serine
GRLSPVPVPYFFRKNLLRLTG

SEQ ID NO: 3395 - protein, 20 aa, Artificial Sequence
  Description of Artificial Sequence: Synthetic peptide
  MOD_RES (4)..(4): phosphorylated serine
GRQSPSFKLFFRKNLLRLTG

SEQ ID NO: 3396 - protein, 20 aa, Artificial Sequence
  Description of Artificial Sequence: Synthetic peptide
  MOD_RES (3)..(3): phosphorylated serine
GRSSPPPGYFFRKNLLRLTG

SEQ ID NO: 3397 - protein, 22 aa, Artificial Sequence
  Description of Artificial Sequence: Synthetic peptide
  MOD_RES (4)..(4): phosphorylated serine
GRSSTASLVKFFFRKNLLRLTG

SEQ ID NO: 3398 - protein, 22 aa, Artificial Sequence
  Description of Artificial Sequence: Synthetic peptide
  MOD_RES (4)..(4): phosphorylated serine
GRSSTASLVKKFFRKNLLRLTG

SEQ ID NO: 3399 - protein, 23 aa, Artificial Sequence
  Description of Artificial Sequence: Synthetic peptide
  MOD_RES (4)..(4): phosphorylated serine
GRSSTASLVKKKFFRKNLLRLTG

SEQ ID NO: 3400 - protein, 22 aa, Artificial Sequence
  Description of Artificial Sequence: Synthetic peptide
  MOD_RES (4)..(4): phosphorylated serine
GRSSTASLVKLFFRKNLLRLTG

SEQ ID NO: 3401 - protein, 22 aa, Artificial Sequence
  Description of Artificial Sequence: Synthetic peptide
  MOD_RES (4)..(4): phosphorylated serine
GRSSTASLVKMFFRKNLLRLTG

SEQ ID NO: 3402 - protein, 22 aa, Artificial Sequence
  Description of Artificial Sequence: Synthetic peptide
  MOD_RES (4)..(4): phosphorylated serine
GRSSTASLVKRFFRKNLLRLTG

SEQ ID NO: 3403 - protein, 22 aa, Artificial Sequence
  Description of Artificial Sequence: Synthetic peptide
  MOD_RES (4)..(4): phosphorylated serine
GRSSTASLVKYFFRKNLLRLTG

SEQ ID NO: 3404 - protein, 19 aa, Artificial Sequence
  Description of Artificial Sequence: Synthetic peptide
  MOD_RES (3)..(3): phosphorylated threonine
GRTGLPDLFFRKNLLRLTG

SEQ ID NO: 3405 - protein, 39 aa, Artificial Sequence
  Description of Artificial Sequence: Synthetic polypeptide
  MOD_RES (21)..(21): phosphorylated serine
GSALGGGGAGLSGRASGGAQSPLRYLHVFFRKNLLRLTG

SEQ ID NO: 3406 - protein, 22 aa, Artificial Sequence
  Description of Artificial Sequence: Synthetic peptide
  MOD_RES (4)..(4): phosphorylated serine
GSDSSDDGKKYFFRKNLLRLTG

SEQ ID NO: 3407 - protein, 22 aa, Artificial Sequence
  Description of Artificial Sequence: Synthetic peptide
  MOD_RES (4)..(4): phosphorylated serine
GSESSDDGKKYFFRKNLLRLTG

SEQ ID NO: 3408 - protein, 20 aa, Artificial Sequence
  Description of Artificial Sequence: Synthetic peptide
  MOD_RES (2)..(2): phosphorylated serine
GSPHYFSPFFFRKNLLRLTG

SEQ ID NO: 3409 - protein, 23 aa, Artificial Sequence
  Description of Artificial Sequence: Synthetic peptide
  MOD_RES (2)..(2): phosphorylated serine
GSPHYFSPFRPYFFRKNLLRLTG

SEQ ID NO: 3410 - protein, 28 aa, Artificial Sequence
  Description of Artificial Sequence: Synthetic peptide
  MOD_RES (2)..(2): phosphorylated serine
GSPTMVEKGLEPGVFTLFFRKNLLRLTG

SEQ ID NO: 3411 - protein, 21 aa, Artificial Sequence
  Description of Artificial Sequence: Synthetic peptide
  MOD_RES (2)..(2): phosphorylated serine
GSQLAVMMYLFFRKNLLRLTG

SEQ ID NO: 3412 - protein, 22 aa, Artificial Sequence
  Description of Artificial Sequence: Synthetic peptide
  MOD_RES (4)..(4): phosphorylated serine
GTDSSDDGKKYFFRKNLLRLTG

SEQ ID NO: 3413 - protein, 22 aa, Artificial Sequence
  Description of Artificial Sequence: Synthetic peptide
  MOD_RES (4)..(4): phosphorylated serine
GTESSDDGKKYFFRKNLLRLTG

SEQ ID NO: 3414 - protein, 22 aa, Artificial Sequence
  Description of Artificial Sequence: Synthetic peptide
  MOD_RES (7)..(7): phosphorylated serine
GTIRSRSFIFKFFRKNLLRLTG

SEQ ID NO: 3415 - protein, 22 aa, Artificial Sequence
  Description of Artificial Sequence: Synthetic peptide
  MOD_RES (7)..(7): phosphorylated serine
GTIRSRSFIFYFFRKNLLRLTG

SEQ ID NO: 3416 - protein, 17 aa, Artificial Sequence
  Description of Artificial Sequence: Synthetic peptide
  MOD_RES (2)..(2): phosphorylated threonine
GTLPKYFFRKNLLRLTG

SEQ ID NO: 3417 - protein, 24 aa, Artificial Sequence
  Description of Artificial Sequence: Synthetic peptide
  MOD_RES (2)..(2): phosphorylated threonine
GTLRRSDSQQAVKFFRKNLLRLTG

SEQ ID NO: 3418 - protein, 25 aa, Artificial Sequence
  Description of Artificial Sequence: Synthetic peptide
  MOD_RES (2)..(2): phosphorylated threonine
GTLRRSDSQQAVKSFFRKNLLRLTG

SEQ ID NO: 3419 - protein, 27 aa, Artificial Sequence
  Description of Artificial Sequence: Synthetic peptide
  MOD_RES (2)..(2): phosphorylated threonine
GTLRRSDSQQAVKSPPFFRKNLLRLTG

SEQ ID NO: 3420 - protein, 20 aa, Artificial Sequence
  Description of Artificial Sequence: Synthetic peptide
  MOD_RES (4)..(4): phosphorylated serine
GVASPTITVFFRKNLLRLTG

SEQ ID NO: 3421 - protein, 20 aa, Artificial Sequence
  Description of Artificial Sequence: Synthetic peptide
  MOD_RES (4)..(4): phosphorylated serine
GVVSPTFELFFRKNLLRLTG

SEQ ID NO: 3422 - protein, 19 aa, Artificial Sequence
  Description of Artificial Sequence: Synthetic peptide
  MOD_RES (7)..(7): phosphorylated serine
HEKKAYSFFFRKNLLRLTG

SEQ ID NO: 3423 - protein, 30 aa, Artificial Sequence
  Description of Artificial Sequence: Synthetic polypeptide
  MOD_RES (17)..(17): phosphorylated serine
  MOD_RES (18)..(18): phosphorylated serine
HKGEIRGASTPFQFRASSPFFRKNLLRLTG

SEQ ID NO: 3424 - protein, 20 aa, Artificial Sequence
  Description of Artificial Sequence: Synthetic peptide
  MOD_RES (4)..(4): phosphorylated serine
HLHSPQHKLFFRKNLLRLTG

SEQ ID NO: 3425 - protein, 19 aa, Artificial Sequence
  Description of Artificial Sequence: Synthetic peptide
  MOD_RES (7)..(7): phosphorylated serine
HPKRSVSLFFRKNLLRLTG

SEQ ID NO: 3426 - protein, 19 aa, Artificial Sequence
  Description of Artificial Sequence: Synthetic peptide
  MOD_RES (4)..(4): phosphorylated serine
HPRSPNVLFFRKNLLRLTG

SEQ ID NO: 3427 - protein, 21 aa, Artificial Sequence
  Description of Artificial Sequence: Synthetic peptide
  MOD_RES (4)..(4): phosphorylated serine
HPRSPNVLSFFFRKNLLRLTG

SEQ ID NO: 3428 - protein, 21 aa, Artificial Sequence
  Description of Artificial Sequence: Synthetic peptide
  MOD_RES (4)..(4): phosphorylated serine
HPRSPNVLSLFFRKNLLRLTG

SEQ ID NO: 3429 - protein, 21 aa, Artificial Sequence
  Description of Artificial Sequence: Synthetic peptide
  MOD_RES (4)..(4): phosphorylated serine
HPRSPNVLSMFFRKNLLRLTG

SEQ ID NO: 3430 - protein, 21 aa, Artificial Sequence
  Description of Artificial Sequence: Synthetic peptide
  MOD_RES (4)..(4): phosphorylated serine
HPRSPNVLSVFFRKNLLRLTG

SEQ ID NO: 3431 - protein, 20 aa, Artificial Sequence
  Description of Artificial Sequence: Synthetic peptide
  MOD_RES (4)..(4): phosphorylated serine
HPRSPTPTFFFRKNLLRLTG

SEQ ID NO: 3432 - protein, 20 aa, Artificial Sequence
  Description of Artificial Sequence: Synthetic peptide
  MOD_RES (6)..(6): phosphorylated threonine
HPRSPTPTFFFRKNLLRLTG

SEQ ID NO: 3433 - protein, 20 aa, Artificial Sequence
  Description of Artificial Sequence: Synthetic peptide
  MOD_RES (4)..(4): phosphorylated serine
HPRSPTPTLFFRKNLLRLTG

SEQ ID NO: 3434 - protein, 20 aa, Artificial Sequence
  Description of Artificial Sequence: Synthetic peptide
  MOD_RES (6)..(6): phosphorylated threonine
HPRSPTPTLFFRKNLLRLTG

SEQ ID NO: 3435 - protein, 20 aa, Artificial Sequence
  Description of Artificial Sequence: Synthetic peptide
  MOD_RES (4)..(4): phosphorylated serine
HPRSPTPTMFFRKNLLRLTG

SEQ ID NO: 3436 - protein, 20 aa, Artificial Sequence
  Description of Artificial Sequence: Synthetic peptide
  MOD_RES (6)..(6): phosphorylated threonine
HPRSPTPTMFFRKNLLRLTG

SEQ ID NO: 3437 - protein, 20 aa, Artificial Sequence
  Description of Artificial Sequence: Synthetic peptide
  MOD_RES (6)..(6): phosphorylated threonine
HPRSPTPTVFFRKNLLRLTG

SEQ ID NO: 3438 - protein, 20 aa, Artificial Sequence
  Description of Artificial Sequence: Synthetic peptide
  MOD_RES (3)..(3): phosphorylated serine
HPSSPTPTVFFRKNLLRLTG

SEQ ID NO: 3439 - protein, 21 aa, Artificial Sequence
  Description of Artificial Sequence: Synthetic peptide
  MOD_RES (4)..(4): phosphorylated serine
HRLSPVKGEFFFRKNLLRLTG

SEQ ID NO: 3440 - protein, 21 aa, Artificial Sequence
  Description of Artificial Sequence: Synthetic peptide
  MOD_RES (4)..(4): phosphorylated serine
HRLSPVKGEKFFRKNLLRLTG

SEQ ID NO: 3441 - protein, 21 aa, Artificial Sequence
  Description of Artificial Sequence: Synthetic peptide
  MOD_RES (4)..(4): phosphorylated serine
HRLSPVKGERFFRKNLLRLTG

SEQ ID NO: 3442 - protein, 21 aa, Artificial Sequence
  Description of Artificial Sequence: Synthetic peptide
  MOD_RES (4)..(4): phosphorylated serine
HRLSPVKGEYFFRKNLLRLTG

SEQ ID NO: 3443 - protein, 20 aa, Artificial Sequence
  Description of Artificial Sequence: Synthetic peptide
  MOD_RES (4)..(4): phosphorylated serine
HRNSMKVFLFFRKNLLRLTG

SEQ ID NO: 3444 - protein, 22 aa, Artificial Sequence
  Description of Artificial Sequence: Synthetic peptide
  MOD_RES (4)..(4): phosphorylated serine
HRNSNPVIAEFFFRKNLLRLTG

SEQ ID NO: 3445 - protein, 22 aa, Artificial Sequence
  Description of Artificial Sequence: Synthetic peptide
  MOD_RES (4)..(4): phosphorylated serine
HRNSNPVIAEKFFRKNLLRLTG

SEQ ID NO: 3446 - protein, 22 aa, Artificial Sequence
  Description of Artificial Sequence: Synthetic peptide
  MOD_RES (4)..(4): phosphorylated serine
HRNSNPVIAELFFRKNLLRLTG

SEQ ID NO: 3447 - protein, 22 aa, Artificial Sequence
  Description of Artificial Sequence: Synthetic peptide
  MOD_RES (4)..(4): phosphorylated serine
HRNSNPVIAERFFRKNLLRLTG

SEQ ID NO: 3448 - protein, 22 aa, Artificial Sequence
  Description of Artificial Sequence: Synthetic peptide
  MOD_RES (4)..(4): phosphorylated serine
HRNSNPVIAEYFFRKNLLRLTG

SEQ ID NO: 3449 - protein, 20 aa, Artificial Sequence
  Description of Artificial Sequence: Synthetic peptide
  MOD_RES (4)..(4): phosphorylated serine
HRYSTPHAFFFRKNLLRLTG

SEQ ID NO: 3450 - protein, 21 aa, Artificial Sequence
  Description of Artificial Sequence: Synthetic peptide
  MOD_RES (4)..(4): phosphorylated serine
HTASPTGMMKFFRKNLLRLTG

SEQ ID NO: 3451 - protein, 20 aa, Artificial Sequence
  Description of Artificial Sequence: Synthetic peptide
  MOD_RES (4)..(4): phosphorylated threonine
HVYTPSTTKFFRKNLLRLTG

SEQ ID NO: 3452 - protein, 26 aa, Artificial Sequence
  Description of Artificial Sequence: Synthetic peptide
  MOD_RES (5)..(5): phosphorylated tyrosine
IEKIYIMKADTVIVGFFRKNLLRLTG

SEQ ID NO: 3453 - protein, 20 aa, Artificial Sequence
  Description of Artificial Sequence: Synthetic peptide
  MOD_RES (4)..(4): phosphorylated threonine
IIETPHKEIFFRKNLLRLTG

SEQ ID NO: 3454 - protein, 20 aa, Artificial Sequence
  Description of Artificial Sequence: Synthetic peptide
  MOD_RES (4)..(4): phosphorylated threonine
IIETPHKEYFFRKNLLRLTG

SEQ ID NO: 3455 - protein, 20 aa, Artificial Sequence
  Description of Artificial Sequence: Synthetic peptide
  MOD_RES (4)..(4): phosphorylated serine
IISSPLKGYFFRKNLLRLTG

SEQ ID NO: 3456 - protein, 20 aa, Artificial Sequence
  Description of Artificial Sequence: Synthetic peptide
  MOD_RES (4)..(4): phosphorylated serine
IISSPLTGKFFRKNLLRLTG

SEQ ID NO: 3457 - protein, 20 aa, Artificial Sequence
  Description of Artificial Sequence: Synthetic peptide
  MOD_RES (5)..(5): phosphorylated threonine
ILDRTPEKLFFRKNLLRLTG

SEQ ID NO: 3458 - protein, 20 aa, Artificial Sequence
  Description of Artificial Sequence: Synthetic peptide
  MOD_RES (5)..(5): phosphorylated threonine
ILDRTPEKVFFRKNLLRLTG

SEQ ID NO: 3459 - protein, 20 aa, Artificial Sequence
  Description of Artificial Sequence: Synthetic peptide
  MOD_RES (4)..(4): phosphorylated serine
ILDSGIYRIFFRKNLLRLTG

SEQ ID NO: 3460 - protein, 20 aa, Artificial Sequence
  Description of Artificial Sequence: Synthetic peptide
  MOD_RES (4)..(4): phosphorylated serine
ILDSGIYRVFFRKNLLRLTG

SEQ ID NO: 3461 - protein, 19 aa, Artificial Sequence
  Description of Artificial Sequence: Synthetic peptide
  MOD_RES (7)..(7): phosphorylated serine
ILKPRRSLFFRKNLLRLTG

SEQ ID NO: 3462 - protein, 21 aa, Artificial Sequence
  Description of Artificial Sequence: Synthetic peptide
  MOD_RES (4)..(4): phosphorylated serine
ILKSPEIQRAFFRKNLLRLTG

SEQ ID NO: 3463 - protein, 21 aa, Artificial Sequence
  Description of Artificial Sequence: Synthetic peptide
  MOD_RES (4)..(4): phosphorylated serine
ILKSPEIQRVFFRKNLLRLTG

SEQ ID NO: 3464 - protein, 20 aa, Artificial Sequence
  Description of Artificial Sequence: Synthetic peptide
  MOD_RES (4)..(4): phosphorylated threonine
ILQTPQFQMFFRKNLLRLTG

SEQ ID NO: 3465 - protein, 20 aa, Artificial Sequence
  Description of Artificial Sequence: Synthetic peptide
  MOD_RES (5)..(5): phosphorylated serine
ILQVSIPSLFFRKNLLRLTG

SEQ ID NO: 3466 - protein, 20 aa, Artificial Sequence
  Description of Artificial Sequence: Synthetic peptide
  MOD_RES (5)..(5): phosphorylated threonine
IMDRTPEKLFFRKNLLRLTG

SEQ ID NO: 3467 - protein, 20 aa, Artificial Sequence
  Description of Artificial Sequence: Synthetic peptide
  MOD_RES (5)..(5): phosphorylated threonine
IMDRTPEKVFFRKNLLRLTG

SEQ ID NO: 3468 - protein, 20 aa, Artificial Sequence
  Description of Artificial Sequence: Synthetic peptide
  MOD_RES (4)..(4): phosphorylated serine
IMDSGIYRIFFRKNLLRLTG

SEQ ID NO: 3469 - protein, 20 aa, Artificial Sequence
  Description of Artificial Sequence: Synthetic peptide
  MOD_RES (4)..(4): phosphorylated serine
IMDSGIYRVFFRKNLLRLTG

SEQ ID NO: 3470 - protein, 21 aa, Artificial Sequence
  Description of Artificial Sequence: Synthetic peptide
  MOD_RES (4)..(4): phosphorylated serine
IMKSPEIQRAFFRKNLLRLTG

SEQ ID NO: 3471 - protein, 21 aa, Artificial Sequence
  Description of Artificial Sequence: Synthetic peptide
  MOD_RES (4)..(4): phosphorylated serine
IMKSPEIQRVFFRKNLLRLTG

SEQ ID NO: 3472 - protein, 20 aa, Artificial Sequence
  Description of Artificial Sequence: Synthetic peptide
  MOD_RES (8)..(8): phosphorylated serine
INKERRSSLFFRKNLLRLTG

SEQ ID NO: 3473 - protein, 21 aa, Artificial Sequence
  Description of Artificial Sequence: Synthetic peptide
IPVGSSHNSLFFRKNLLRLTG

SEQ ID NO: 3474 - protein, 21 aa, Artificial Sequence
  Description of Artificial Sequence: Synthetic peptide
  MOD_RES (4)..(4): phosphorylated serine
IQFSPPFPGAFFRKNLLRLTG

SEQ ID NO: 3475 - protein, 19 aa, Artificial Sequence
  Description of Artificial Sequence: Synthetic peptide
  MOD_RES (5)..(5): phosphorylated threonine
ISDGTLKYFFRKNLLRLTG

SEQ ID NO: 3476 - protein, 20 aa, Artificial Sequence
  Description of Artificial Sequence: Synthetic peptide
  MOD_RES (5)..(5): phosphorylated threonine
ISDGTPLKYFFRKNLLRLTG

SEQ ID NO: 3477 - protein, 20 aa, Artificial Sequence
  Description of Artificial Sequence: Synthetic peptide
  MOD_RES (7)..(7): phosphorylated threonine
ISDSAHTDYFFRKNLLRLTG

SEQ ID NO: 3478 - protein, 20 aa, Artificial Sequence
  Description of Artificial Sequence: Synthetic peptide
  MOD_RES (4)..(4): phosphorylated serine
ISDSMHSLYFFRKNLLRLTG

SEQ ID NO: 3479 - protein, 20 aa, Artificial Sequence
  Description of Artificial Sequence: Synthetic peptide
  MOD_RES (4)..(4): phosphorylated threonine
ISDTPHKEIFFRKNLLRLTG

SEQ ID NO: 3480 - protein, 20 aa, Artificial Sequence
  Description of Artificial Sequence: Synthetic peptide
  MOD_RES (4)..(4): phosphorylated threonine
ISDTPHKEYFFRKNLLRLTG

SEQ ID NO: 3481 - protein, 19 aa, Artificial Sequence
  Description of Artificial Sequence: Synthetic peptide
  MOD_RES (5)..(5): phosphorylated threonine
ISEGTLKYFFRKNLLRLTG

SEQ ID NO: 3482 - protein, 20 aa, Artificial Sequence
  Description of Artificial Sequence: Synthetic peptide
  MOD_RES (5)..(5): phosphorylated threonine
ISEGTPLKYFFRKNLLRLTG

SEQ ID NO: 3483 - protein, 20 aa, Artificial Sequence
  Description of Artificial Sequence: Synthetic peptide
  MOD_RES (7)..(7): phosphorylated threonine
ISESAHTDYFFRKNLLRLTG

SEQ ID NO: 3484 - protein, 20 aa, Artificial Sequence
  Description of Artificial Sequence: Synthetic peptide
  MOD_RES (4)..(4): phosphorylated serine
ISESMHSLYFFRKNLLRLTG

SEQ ID NO: 3485 - protein, 20 aa, Artificial Sequence
  Description of Artificial Sequence: Synthetic peptide
  MOD_RES (4)..(4): phosphorylated threonine
ISETPHKEIFFRKNLLRLTG

SEQ ID NO: 3486 - protein, 20 aa, Artificial Sequence
  Description of Artificial Sequence: Synthetic peptide
  MOD_RES (4)..(4): phosphorylated threonine
ISETPHKEYFFRKNLLRLTG

SEQ ID NO: 3487 - protein, 20 aa, Artificial Sequence
  Description of Artificial Sequence: Synthetic peptide
  MOD_RES (7)..(7): phosphorylated threonine
ISFSAHTDYFFRKNLLRLTG

SEQ ID NO: 3488 - protein, 20 aa, Artificial Sequence
  Description of Artificial Sequence: Synthetic peptide
  MOD_RES (4)..(4): phosphorylated serine
ISSSMHSLYFFRKNLLRLTG

SEQ ID NO: 3489 - protein, 19 aa, Artificial Sequence
  Description of Artificial Sequence: Synthetic peptide
  MOD_RES (3)..(3): phosphorylated threonine
ISTDRDPLFFRKNLLRLTG

SEQ ID NO: 3490 - protein, 19 aa, Artificial Sequence
  Description of Artificial Sequence: Synthetic peptide
  MOD_RES (3)..(3): phosphorylated threonine
ISTDRDPYFFRKNLLRLTG

SEQ ID NO: 3491 - protein, 19 aa, Artificial Sequence
  Description of Artificial Sequence: Synthetic peptide
  MOD_RES (5)..(5): phosphorylated threonine
ITDGTLKYFFRKNLLRLTG

SEQ ID NO: 3492 - protein, 20 aa, Artificial Sequence
  Description of Artificial Sequence: Synthetic peptide
  MOD_RES (5)..(5): phosphorylated threonine
ITDGTPLKYFFRKNLLRLTG

SEQ ID NO: 3493 - protein, 20 aa, Artificial Sequence
  Description of Artificial Sequence: Synthetic peptide
  MOD_RES (7)..(7): phosphorylated threonine
ITDSAHTDYFFRKNLLRLTG

SEQ ID NO: 3494 - protein, 20 aa, Artificial Sequence
  Description of Artificial Sequence: Synthetic peptide
  MOD_RES (4)..(4): phosphorylated serine
ITDSMHSLYFFRKNLLRLTG

SEQ ID NO: 3495 - protein, 20 aa, Artificial Sequence
  Description of Artificial Sequence: Synthetic peptide
  MOD_RES (4)..(4): phosphorylated threonine
ITDTPHKEIFFRKNLLRLTG

SEQ ID NO: 3496 - protein, 20 aa, Artificial Sequence
  Description of Artificial Sequence: Synthetic peptide
  MOD_RES (4)..(4): phosphorylated threonine
ITDTPHKEYFFRKNLLRLTG

SEQ ID NO: 3497 - protein, 19 aa, Artificial Sequence
  Description of Artificial Sequence: Synthetic peptide
  MOD_RES (5)..(5): phosphorylated threonine
ITEGTLKYFFRKNLLRLTG

SEQ ID NO: 3498 - protein, 20 aa, Artificial Sequence
  Description of Artificial Sequence: Synthetic peptide
  MOD_RES (5)..(5): phosphorylated threonine
ITEGTPLKYFFRKNLLRLTG

SEQ ID NO: 3499 - protein, 20 aa, Artificial Sequence
  Description of Artificial Sequence: Synthetic peptide
  MOD_RES (7)..(7): phosphorylated threonine
ITESAHTDYFFRKNLLRLTG

SEQ ID NO: 3500 - protein, 20 aa, Artificial Sequence
  Description of Artificial Sequence: Synthetic peptide
  MOD_RES (4)..(4): phosphorylated serine
ITESMHSLYFFRKNLLRLTG

SEQ ID NO: 3501 - protein, 20 aa, Artificial Sequence
  Description of Artificial Sequence: Synthetic peptide
  MOD_RES (4)..(4): phosphorylated threonine
ITETPHKEIFFRKNLLRLTG

SEQ ID NO: 3502 - protein, 20 aa, Artificial Sequence
  Description of Artificial Sequence: Synthetic peptide
  MOD_RES (4)..(4): phosphorylated threonine
ITETPHKEYFFRKNLLRLTG

SEQ ID NO: 3503 - protein, 19 aa, Artificial Sequence
  Description of Artificial Sequence: Synthetic peptide
  MOD_RES (5)..(5): phosphorylated threonine
ITQGTLKYFFRKNLLRLTG

SEQ ID NO: 3504 - protein, 20 aa, Artificial Sequence
  Description of Artificial Sequence: Synthetic peptide
  MOD_RES (5)..(5): phosphorylated threonine
ITQGTPLKKFFRKNLLRLTG

SEQ ID NO: 3505 - protein, 20 aa, Artificial Sequence
  Description of Artificial Sequence: Synthetic peptide
  MOD_RES (5)..(5): phosphorylated threonine
ITQGTPLKYFFRKNLLRLTG

SEQ ID NO: 3506 - protein, 19 aa, Artificial Sequence
  Description of Artificial Sequence: Synthetic peptide
  MOD_RES (3)..(3): phosphorylated threonine
ITTDRDPLFFRKNLLRLTG

SEQ ID NO: 3507 - protein, 19 aa, Artificial Sequence
  Description of Artificial Sequence: Synthetic peptide
  MOD_RES (3)..(3): phosphorylated threonine
ITTDRDPYFFRKNLLRLTG

SEQ ID NO: 3508 - protein, 22 aa, Artificial Sequence
  Description of Artificial Sequence: Synthetic peptide
  MOD_RES (4)..(4): phosphorylated serine
IVLSDSEVIQLFFRKNLLRLTG

SEQ ID NO: 3509 - protein, 18 aa, Artificial Sequence
  Description of Artificial Sequence: Synthetic peptide
  MOD_RES (4)..(4): phosphorylated tyrosine
IVRYHQLFFRKNLLRLTG

SEQ ID NO: 3510 - protein, 19 aa, Artificial Sequence
  Description of Artificial Sequence: Synthetic peptide
  MOD_RES (3)..(3): phosphorylated threonine
IVTDRDPLFFRKNLLRLTG

SEQ ID NO: 3511 - protein, 19 aa, Artificial Sequence
  Description of Artificial Sequence: Synthetic peptide
  MOD_RES (3)..(3): phosphorylated threonine
IVTDRDPYFFRKNLLRLTG

SEQ ID NO: 3512 - protein, 20 aa, Artificial Sequence
  Description of Artificial Sequence: Synthetic peptide
  MOD_RES (4)..(4): phosphorylated tyrosine
IYQYIQSRFFFRKNLLRLTG

SEQ ID NO: 3513 - protein, 18 aa, Artificial Sequence
  Description of Artificial Sequence: Synthetic peptide
  MOD_RES (4)..(4): phosphorylated serine
KAFSPVRFFRKNLLRLTG

SEQ ID NO: 3514 - protein, 20 aa, Artificial Sequence
  Description of Artificial Sequence: Synthetic peptide
  MOD_RES (4)..(4): phosphorylated serine
KAFSPVRSVFFRKNLLRLTG

SEQ ID NO: 3515 - protein, 20 aa, Artificial Sequence
  Description of Artificial Sequence: Synthetic peptide
  MOD_RES (4)..(4): phosphorylated serine
KAKSPAPGLFFRKNLLRLTG

SEQ ID NO: 3516 - protein, 20 aa, Artificial Sequence
  Description of Artificial Sequence: Synthetic peptide
  MOD_RES (4)..(4): phosphorylated serine
KAKSPAPGVFFRKNLLRLTG

SEQ ID NO: 3517 - protein, 20 aa, Artificial Sequence
  Description of Artificial Sequence: Synthetic peptide
  MOD_RES (4)..(4): phosphorylated serine
KARSPGRAFFFRKNLLRLTG

SEQ ID NO: 3518 - protein, 20 aa, Artificial Sequence
  Description of Artificial Sequence: Synthetic peptide
  MOD_RES (4)..(4): phosphorylated serine
KARSPGRALFFRKNLLRLTG

SEQ ID NO: 3519 - protein, 20 aa, Artificial Sequence
  Description of Artificial Sequence: Synthetic peptide
  MOD_RES (4)..(4): phosphorylated serine
KARSPGRAMFFRKNLLRLTG

SEQ ID NO: 3520 - protein, 20 aa, Artificial Sequence
  Description of Artificial Sequence: Synthetic peptide
  MOD_RES (4)..(4): phosphorylated serine
KARSPGRAVFFRKNLLRLTG

SEQ ID NO: 3521 - protein, 20 aa, Artificial Sequence
  Description of Artificial Sequence: Synthetic peptide
  MOD_RES (8)..(8): phosphorylated serine
KASPKRLSLFFRKNLLRLTG

SEQ ID NO: 3522 - protein, 20 aa, Artificial Sequence
  Description of Artificial Sequence: Synthetic peptide
  MOD_RES (4)..(4): phosphorylated serine
  MISC_FEATURE (8)..(8): present in a cysteine-cysteine disulfide bond
KAVSLFLCYFFRKNLLRLTG

SEQ ID NO: 3523 - protein, 20 aa, Artificial Sequence
  Description of Artificial Sequence: Synthetic peptide
  MOD_RES (4)..(4): phosphorylated serine
KAVSLFLCYFFRKNLLRLTG

SEQ ID NO: 3524 - protein, 35 aa, Artificial Sequence
  Description of Artificial Sequence: Synthetic polypeptide
  MOD_RES (10)..(10): phosphorylated serine
KEGEEPTVYSDEEEPKDESARKNDFFRKNLLRLTG

SEQ ID NO: 3525 - protein, 20 aa, Artificial Sequence
  Description of Artificial Sequence: Synthetic peptide
  MOD_RES (4)..(4): phosphorylated serine
KEKSPFRETFFRKNLLRLTG

SEQ ID NO: 3526 - protein, 20 aa, Artificial Sequence
  Description of Artificial Sequence: Synthetic peptide
  MOD_RES (8)..(8): phosphorylated serine
KELARQISFFFRKNLLRLTG

SEQ ID NO: 3527 - protein, 20 aa, Artificial Sequence
  Description of Artificial Sequence: Synthetic peptide
  MOD_RES (4)..(4): phosphorylated serine
KEMSPTRQFFFRKNLLRLTG

SEQ ID NO: 3528 - protein, 20 aa, Artificial Sequence
  Description of Artificial Sequence: Synthetic peptide
  MOD_RES (3)..(3): oxidized methionine
  MOD_RES (4)..(4): phosphorylated serine
KEMSPTRQLFFRKNLLRLTG

SEQ ID NO: 3529 - protein, 20 aa, Artificial Sequence
  Description of Artificial Sequence: Synthetic peptide
  MOD_RES (4)..(4): phosphorylated serine
KEMSPTRQLFFRKNLLRLTG

SEQ ID NO: 3530 - protein, 20 aa, Artificial Sequence
  Description of Artificial Sequence: Synthetic peptide
  MOD_RES (4)..(4): phosphorylated serine
KEMSPTRQWFFRKNLLRLTG

SEQ ID NO: 3531 - protein, 20 aa, Artificial Sequence
  Description of Artificial Sequence: Synthetic peptide
  MOD_RES (4)..(4): phosphorylated serine
KEMSPTRQYFFRKNLLRLTG

SEQ ID NO: 3532 - protein, 22 aa, Artificial Sequence
  Description of Artificial Sequence: Synthetic peptide
  MOD_RES (4)..(4): phosphorylated serine
KESSPLSSRKIFFRKNLLRLTG

SEQ ID NO: 3533 - protein, 20 aa, Artificial Sequence
  Description of Artificial Sequence: Synthetic peptide
  MOD_RES (8)..(8): phosphorylated serine
KFRPPPLSLFFRKNLLRLTG

SEQ ID NO: 3534 - protein, 22 aa, Artificial Sequence
  Description of Artificial Sequence: Synthetic peptide
  MOD_RES (4)..(4): phosphorylated serine
KGISSSSLKEKFFRKNLLRLTG

SEQ ID NO: 3535 - protein, 20 aa, Artificial Sequence
  Description of Artificial Sequence: Synthetic peptide
  MOD_RES (4)..(4): phosphorylated serine
KIASEIAQLFFRKNLLRLTG

SEQ ID NO: 3536 - protein, 21 aa, Artificial Sequence
  Description of Artificial Sequence: Synthetic peptide
  MOD_RES (6)..(6): phosphorylated serine
KIDIVSSQKVFFRKNLLRLTG

SEQ ID NO: 3537 - protein, 21 aa, Artificial Sequence
  Description of Artificial Sequence: Synthetic peptide
  MOD_RES (4)..(4): phosphorylated serine
KIDSPTKVKKFFRKNLLRLTG

SEQ ID NO: 3538 - protein, 27 aa, Artificial Sequence
  Description of Artificial Sequence: Synthetic peptide
  MOD_RES (6)..(6): phosphorylated tyrosine
KIEKIYIMKADTVIVGFFRKNLLRLTG

SEQ ID NO: 3539 - protein, 21 aa, Artificial Sequence
  Description of Artificial Sequence: Synthetic peptide
  MOD_RES (4)..(4): phosphorylated serine
KIESLENLYLFFRKNLLRLTG

SEQ ID NO: 3540 - protein, 20 aa, Artificial Sequence
  Description of Artificial Sequence: Synthetic peptide
  MOD_RES (4)..(4): phosphorylated serine
KIFSGVFVKFFRKNLLRLTG

SEQ ID NO: 3541 - protein, 21 aa, Artificial Sequence
  Description of Artificial Sequence: Synthetic peptide
  MOD_RES (4)..(4): phosphorylated serine
KIFSGVFVKVFFRKNLLRLTG

SEQ ID NO: 3542 - protein, 20 aa, Artificial Sequence
  Description of Artificial Sequence: Synthetic peptide
  MOD_RES (4)..(4): phosphorylated serine
KIFSKQQGKFFRKNLLRLTG

SEQ ID NO: 3543 - protein, 20 aa, Artificial Sequence
  Description of Artificial Sequence: Synthetic peptide
  MOD_RES (4)..(4): phosphorylated serine
KIFSKQQGYFFRKNLLRLTG

SEQ ID NO: 3544 - protein, 20 aa, Artificial Sequence
  Description of Artificial Sequence: Synthetic peptide
  MOD_RES (4)..(4): phosphorylated serine
KIGSIIFQVFFRKNLLRLTG

SEQ ID NO: 3545 - protein, 20 aa, Artificial Sequence
  Description of Artificial Sequence: Synthetic peptide
  MOD_RES (4)..(4): phosphorylated serine
KIKSFEVVFFFRKNLLRLTG

SEQ ID NO: 3546 - protein, 21 aa, Artificial Sequence
  Description of Artificial Sequence: Synthetic peptide
  MOD_RES (5)..(5): phosphorylated serine
KIRSSPREAKFFRKNLLRLTG

SEQ ID NO: 3547 - protein, 21 aa, Artificial Sequence
  Description of Artificial Sequence: Synthetic peptide
  MOD_RES (5)..(5): phosphorylated serine
KIRSSPREAYFFRKNLLRLTG

SEQ ID NO: 3548 - protein, 20 aa, Artificial Sequence
  Description of Artificial Sequence: Synthetic peptide
  MOD_RES (5)..(5): phosphorylated serine
KIRTSPTFRFFRKNLLRLTG

SEQ ID NO: 3549 - protein, 20 aa, Artificial Sequence
  Description of Artificial Sequence: Synthetic peptide
  MOD_RES (5)..(5): phosphorylated serine
KIRTSPTFYFFRKNLLRLTG

SEQ ID NO: 3550 - protein, 22 aa, Artificial Sequence
  Description of Artificial Sequence: Synthetic peptide
  MOD_RES (4)..(4): phosphorylated serine
KLASLEREASVFFRKNLLRLTG

SEQ ID NO: 3551 - protein, 20 aa, Artificial Sequence
  Description of Artificial Sequence: Synthetic peptide
  MOD_RES (4)..(4): phosphorylated serine
KLASLLHQVFFRKNLLRLTG

SEQ ID NO: 3552 - protein, 22 aa, Artificial Sequence
  Description of Artificial Sequence: Synthetic peptide
  MOD_RES (4)..(4): phosphorylated serine
KLASPEKLAGLFFRKNLLRLTG

SEQ ID NO: 3553 - protein, 21 aa, Artificial Sequence
  Description of Artificial Sequence: Synthetic peptide
  MOD_RES (4)..(4): phosphorylated serine
KLASPELERLFFRKNLLRLTG

SEQ ID NO: 3554 - protein, 21 aa, Artificial Sequence
  Description of Artificial Sequence: Synthetic peptide
  MOD_RES (4)..(4): phosphorylated serine
KLASPELERVFFRKNLLRLTG

SEQ ID NO: 3555 - protein, 21 aa, Artificial Sequence
  Description of Artificial Sequence: Synthetic peptide
  MOD_RES (6)..(6): phosphorylated serine
KLDIVSSQKVFFRKNLLRLTG

SEQ ID NO: 3556 - protein, 21 aa, Artificial Sequence
  Description of Artificial Sequence: Synthetic peptide
  MOD_RES (4)..(4): phosphorylated serine
KLDSFLDMQVFFRKNLLRLTG

SEQ ID NO: 3557 - protein, 20 aa, Artificial Sequence
  Description of Artificial Sequence: Synthetic peptide
  MOD_RES (4)..(4): phosphorylated serine
KLDSPRVTVFFRKNLLRLTG

SEQ ID NO: 3558 - protein, 21 aa, Artificial Sequence
  Description of Artificial Sequence: Synthetic peptide
  MOD_RES (4)..(4): phosphorylated serine
KLDSPTKVKKFFRKNLLRLTG

SEQ ID NO: 3559 - protein, 21 aa, Artificial Sequence
  Description of Artificial Sequence: Synthetic peptide
  MOD_RES (4)..(4): phosphorylated serine
KLDSPTKVKYFFRKNLLRLTG

SEQ ID NO: 3560 - protein, 21 aa, Artificial Sequence
  Description of Artificial Sequence: Synthetic peptide
  MOD_RES (6)..(6): phosphorylated threonine
KLFPDTPLALFFRKNLLRLTG

SEQ ID NO: 3561 - protein, 21 aa, Artificial Sequence
  Description of Artificial Sequence: Synthetic peptide
  MOD_RES (6)..(6): phosphorylated threonine
KLFPDTPLAVFFRKNLLRLTG

SEQ ID NO: 3562 - protein, 20 aa, Artificial Sequence
  Description of Artificial Sequence: Synthetic peptide
  MOD_RES (4)..(4): phosphorylated serine
KLFSGTVRKFFRKNLLRLTG

SEQ ID NO: 3563 - protein, 21 aa, Artificial Sequence
  Description of Artificial Sequence: Synthetic peptide
  MOD_RES (4)..(4): phosphorylated serine
KLFSGVFVKVFFRKNLLRLTG

SEQ ID NO: 3564 - protein, 20 aa, Artificial Sequence
  Description of Artificial Sequence: Synthetic peptide
  MOD_RES (4)..(4): phosphorylated serine
KLFSKQQGKFFRKNLLRLTG

SEQ ID NO: 3565 - protein, 20 aa, Artificial Sequence
  Description of Artificial Sequence: Synthetic peptide
  MOD_RES (4)..(4): phosphorylated serine
KLFSKQQGYFFRKNLLRLTG

SEQ ID NO: 3566 - protein, 20 aa, Artificial Sequence
  Description of Artificial Sequence: Synthetic peptide
  MOD_RES (4)..(4): phosphorylated serine
KLFSPAHKKFFRKNLLRLTG

SEQ ID NO: 3567 - protein, 20 aa, Artificial Sequence
  Description of Artificial Sequence: Synthetic peptide
  MOD_RES (4)..(4): phosphorylated serine
KLFSPAHKYFFRKNLLRLTG

SEQ ID NO: 3568 - protein, 22 aa, Artificial Sequence
  Description of Artificial Sequence: Synthetic peptide
  MOD_RES (4)..(4): phosphorylated serine
KLFSPSKEAELFFRKNLLRLTG

SEQ ID NO: 3569 - protein, 22 aa, Artificial Sequence
  Description of Artificial Sequence: Synthetic peptide
  MOD_RES (4)..(4): phosphorylated serine
KLFSPSKEAEVFFRKNLLRLTG

SEQ ID NO: 3570 - protein, 22 aa, Artificial Sequence
  Description of Artificial Sequence: Synthetic peptide
  MOD_RES (5)..(5): phosphorylated serine
KLHGSLARAGKFFRKNLLRLTG

SEQ ID NO: 3571 - protein, 22 aa, Artificial Sequence
  Description of Artificial Sequence: Synthetic peptide
  MOD_RES (5)..(5): phosphorylated serine
KLHGSLARAGYFFRKNLLRLTG

SEQ ID NO: 3572 - protein, 22 aa, Artificial Sequence
  Description of Artificial Sequence: Synthetic peptide
  MOD_RES (7)..(7): phosphorylated serine
KLIDIVSSQKVFFRKNLLRLTG

SEQ ID NO: 3573 - protein, 20 aa, Artificial Sequence
  Description of Artificial Sequence: Synthetic peptide
  MOD_RES (8)..(8): phosphorylated serine
KLIDRTESLFFRKNLLRLTG

SEQ ID NO: 3574 - protein, 21 aa, Artificial Sequence
  Description of Artificial Sequence: Synthetic peptide
  MOD_RES (6)..(6): phosphorylated serine
KLIDVSSQKVFFRKNLLRLTG

SEQ ID NO: 3575 - protein, 22 aa, Artificial Sequence
  Description of Artificial Sequence: Synthetic peptide
  MOD_RES (4)..(4): phosphorylated serine
KLISSSSLKEKFFRKNLLRLTG

SEQ ID NO: 3576 - protein, 22 aa, Artificial Sequence
  Description of Artificial Sequence: Synthetic peptide
  MOD_RES (4)..(4): phosphorylated serine
KLISSSSLKEYFFRKNLLRLTG

SEQ ID NO: 3577 - protein, 20 aa, Artificial Sequence
  Description of Artificial Sequence: Synthetic peptide
  MOD_RES (8)..(8): phosphorylated serine
KLKDRLPSIFFRKNLLRLTG

SEQ ID NO: 3578 - protein, 21 aa, Artificial Sequence
  Description of Artificial Sequence: Synthetic peptide
  MOD_RES (4)..(4): phosphorylated serine
KLKSNPDFLKFFRKNLLRLTG

SEQ ID NO: 3579 - protein, 22 aa, Artificial Sequence
  Description of Artificial Sequence: Synthetic peptide
  MOD_RES (4)..(4): phosphorylated serine
KLKSNPDFLKKFFRKNLLRLTG

SEQ ID NO: 3580 - protein, 22 aa, Artificial Sequence
  Description of Artificial Sequence: Synthetic peptide
  MOD_RES (4)..(4): phosphorylated serine
KLKSNPDFLKYFFRKNLLRLTG

SEQ ID NO: 3581 - protein, 20 aa, Artificial Sequence
  Description of Artificial Sequence: Synthetic peptide
  MOD_RES (4)..(4): phosphorylated serine
KLKSPAPGLFFRKNLLRLTG

SEQ ID NO: 3582 - protein, 20 aa, Artificial Sequence
  Description of Artificial Sequence: Synthetic peptide
  MOD_RES (4)..(4): phosphorylated serine
KLKSPAPGVFFRKNLLRLTG

SEQ ID NO: 3583 - protein, 20 aa, Artificial Sequence
  Description of Artificial Sequence: Synthetic peptide
  MOD_RES (4)..(4): phosphorylated serine
KLKSQEIFLFFRKNLLRLTG

SEQ ID NO: 3584 - protein, 22 aa, Artificial Sequence
  Description of Artificial Sequence: Synthetic peptide
  MOD_RES (5)..(5): phosphorylated serine
KLKSSPLIEKKFFRKNLLRLTG

SEQ ID NO: 3585 - protein, 22 aa, Artificial Sequence
  Description of Artificial Sequence: Synthetic peptide
  MOD_RES (5)..(5): phosphorylated serine
KLKSSPLIEKYFFRKNLLRLTG

SEQ ID NO: 3586 - protein, 20 aa, Artificial Sequence
  Description of Artificial Sequence: Synthetic peptide
  MOD_RES (4)..(4): phosphorylated threonine
KLKTPLVAKFFRKNLLRLTG

SEQ ID NO: 3587 - protein, 20 aa, Artificial Sequence
  Description of Artificial Sequence: Synthetic peptide
  MOD_RES (4)..(4): phosphorylated threonine
KLKTPLVARFFRKNLLRLTG

SEQ ID NO: 3588 - protein, 24 aa, Artificial Sequence
  Description of Artificial Sequence: Synthetic peptide
  MOD_RES (9)..(9): phosphorylated serine
KLLDFGSLSNLQVFFRKNLLRLTG

SEQ ID NO: 3589 - protein, 20 aa, Artificial Sequence
  Description of Artificial Sequence: Synthetic peptide
  MOD_RES (8)..(8): phosphorylated serine
KLLQFYPSLFFRKNLLRLTG

SEQ ID NO: 3590 - protein, 20 aa, Artificial Sequence
  Description of Artificial Sequence: Synthetic peptide
  MOD_RES (8)..(8): phosphorylated serine
KLLQFYPSVFFRKNLLRLTG

SEQ ID NO: 3591 - protein, 21 aa, Artificial Sequence
  Description of Artificial Sequence: Synthetic peptide
  MOD_RES (4)..(4): phosphorylated serine
KLLSPSDEKLFFRKNLLRLTG

SEQ ID NO: 3592 - protein, 21 aa, Artificial Sequence
  Description of Artificial Sequence: Synthetic peptide
  MOD_RES (4)..(4): phosphorylated serine
KLLSPSNEKLFFRKNLLRLTG

SEQ ID NO: 3593 - protein, 21 aa, Artificial Sequence
  Description of Artificial Sequence: Synthetic peptide
  MOD_RES (4)..(4): phosphorylated serine
KLLSPSNEKVFFRKNLLRLTG

SEQ ID NO: 3594 - protein, 21 aa, Artificial Sequence
  Description of Artificial Sequence: Synthetic peptide
  MOD_RES (9)..(9): phosphorylated threonine
KLLSSAQRTLFFRKNLLRLTG

SEQ ID NO: 3595 - protein, 21 aa, Artificial Sequence
  Description of Artificial Sequence: Synthetic peptide
  MOD_RES (9)..(9): phosphorylated threonine
KLLSSAQRTVFFRKNLLRLTG

SEQ ID NO: 3596 - protein, 21 aa, Artificial Sequence
  Description of Artificial Sequence: Synthetic peptide
  MOD_RES (4)..(4): phosphorylated serine
KLLSTEEMELFFRKNLLRLTG

SEQ ID NO: 3597 - protein, 21 aa, Artificial Sequence
  Description of Artificial Sequence: Synthetic peptide
  MOD_RES (4)..(4): phosphorylated serine
KLLSTEEMEVFFRKNLLRLTG

SEQ ID NO: 3598 - protein, 20 aa, Artificial Sequence
  Description of Artificial Sequence: Synthetic peptide
  MOD_RES (4)..(4): phosphorylated serine
KLLSVERIKFFRKNLLRLTG

SEQ ID NO: 3599 - protein, 20 aa, Artificial Sequence
  Description of Artificial Sequence: Synthetic peptide
  MOD_RES (4)..(4): phosphorylated threonine
KLLTPIKEKFFRKNLLRLTG

SEQ ID NO: 3600 - protein, 20 aa, Artificial Sequence
  Description of Artificial Sequence: Synthetic peptide
  MOD_RES (4)..(4): phosphorylated threonine
KLLTPIKEYFFRKNLLRLTG

SEQ ID NO: 3601 - protein, 20 aa, Artificial Sequence
  Description of Artificial Sequence: Synthetic peptide
  MOD_RES (8)..(8): phosphorylated serine
KLMAPDISLFFRKNLLRLTG

SEQ ID NO: 3602 - protein, 20 aa, Artificial Sequence
  Description of Artificial Sequence: Synthetic peptide
  MOD_RES (8)..(8): phosphorylated serine
KLMAPDISVFFRKNLLRLTG

SEQ ID NO: 3603 - protein, 21 aa, Artificial Sequence
  Description of Artificial Sequence: Synthetic peptide
  MOD_RES (9)..(9): phosphorylated serine
KLMIDRTESVFFRKNLLRLTG

SEQ ID NO: 3604 - protein, 20 aa, Artificial Sequence
  Description of Artificial Sequence: Synthetic peptide
  MOD_RES (4)..(4): phosphorylated serine
KLMSDVEDVFFRKNLLRLTG

SEQ ID NO: 3605 - protein, 20 aa, Artificial Sequence
  Description of Artificial Sequence: Synthetic peptide
  MOD_RES (4)..(4): phosphorylated serine
KLMSPKADVFFRKNLLRLTG

SEQ ID NO: 3606 - protein, 22 aa, Artificial Sequence
  Description of Artificial Sequence: Synthetic peptide
  MOD_RES (4)..(4): phosphorylated serine
KLMSPKADVKLFFRKNLLRLTG

SEQ ID NO: 3607 - protein, 22 aa, Artificial Sequence
  Description of Artificial Sequence: Synthetic peptide
  MOD_RES (4)..(4): phosphorylated serine
KLMSPKADVKVFFRKNLLRLTG

SEQ ID NO: 3608 - protein, 20 aa, Artificial Sequence
  Description of Artificial Sequence: Synthetic peptide
  MOD_RES (5)..(5): phosphorylated serine
KLPDSPALAFFRKNLLRLTG

SEQ ID NO: 3609 - protein, 21 aa, Artificial Sequence
  Description of Artificial Sequence: Synthetic peptide
  MOD_RES (5)..(5): phosphorylated serine
KLPDSPALAKFFRKNLLRLTG

SEQ ID NO: 3610 - protein, 22 aa, Artificial Sequence
  Description of Artificial Sequence: Synthetic peptide
  MOD_RES (5)..(5): phosphorylated serine
KLPDSPALAKKFFRKNLLRLTG

SEQ ID NO: 3611 - protein, 22 aa, Artificial Sequence
  Description of Artificial Sequence: Synthetic peptide
  MOD_RES (5)..(5): phosphorylated serine
KLPDSPALAKYFFRKNLLRLTG

SEQ ID NO: 3612 - protein, 21 aa, Artificial Sequence
  Description of Artificial Sequence: Synthetic peptide
  MOD_RES (5)..(5): phosphorylated serine
KLPDSPALAYFFRKNLLRLTG

SEQ ID NO: 3613 - protein, 21 aa, Artificial Sequence
  Description of Artificial Sequence: Synthetic peptide
  MOD_RES (4)..(4): phosphorylated serine
KLPSPAPARKFFRKNLLRLTG

SEQ ID NO: 3614 - protein, 21 aa, Artificial Sequence
  Description of Artificial Sequence: Synthetic peptide
  MOD_RES (5)..(5): phosphorylated serine
KLPTSPLKMKFFRKNLLRLTG

SEQ ID NO: 3615 - protein, 21 aa, Artificial Sequence
  Description of Artificial Sequence: Synthetic peptide
  MOD_RES (5)..(5): phosphorylated serine
KLPTSPLKMYFFRKNLLRLTG

SEQ ID NO: 3616 - protein, 21 aa, Artificial Sequence
  Description of Artificial Sequence: Synthetic peptide
  MOD_RES (5)..(5): phosphorylated threonine
KLPTTPVKAKFFRKNLLRLTG

SEQ ID NO: 3617 - protein, 21 aa, Artificial Sequence
  Description of Artificial Sequence: Synthetic peptide
  MOD_RES (5)..(5): phosphorylated threonine
KLPTTPVKAYFFRKNLLRLTG

SEQ ID NO: 3618 - protein, 20 aa, Artificial Sequence
  Description of Artificial Sequence: Synthetic peptide
  MOD_RES (8)..(8): phosphorylated threonine
KLQEFLQTLFFRKNLLRLTG

SEQ ID NO: 3619 - protein, 20 aa, Artificial Sequence
  Description of Artificial Sequence: Synthetic peptide
  MOD_RES (5)..(5): phosphorylated threonine
KLQVTSLSVFFRKNLLRLTG

SEQ ID NO: 3620 - protein, 20 aa, Artificial Sequence
  Description of Artificial Sequence: Synthetic peptide
  MOD_RES (4)..(4): phosphorylated serine
KLRSPFLQKFFRKNLLRLTG

SEQ ID NO: 3621 - protein, 20 aa, Artificial Sequence
  Description of Artificial Sequence: Synthetic peptide
  MOD_RES (4)..(4): phosphorylated serine
KLRSPFLQYFFRKNLLRLTG

SEQ ID NO: 3622 - protein, 21 aa, Artificial Sequence
  Description of Artificial Sequence: Synthetic peptide
  MOD_RES (5)..(5): phosphorylated serine
KLRSSPREAKFFRKNLLRLTG

SEQ ID NO: 3623 - protein, 20 aa, Artificial Sequence
  Description of Artificial Sequence: Synthetic peptide
  MOD_RES (5)..(5): phosphorylated serine
KLRTSPTFKFFRKNLLRLTG

SEQ ID NO: 3624 - protein, 21 aa, Artificial Sequence
  Description of Artificial Sequence: Synthetic peptide
  MOD_RES (3)..(3): phosphorylated serine
KLSGDQPAARFFRKNLLRLTG

SEQ ID NO: 3625 - protein, 18 aa, Artificial Sequence
  Description of Artificial Sequence: Synthetic peptide
  MOD_RES (6)..(6): phosphorylated serine
KLSGLSFFFRKNLLRLTG

SEQ ID NO: 3626 - protein, 20 aa, Artificial Sequence
  Description of Artificial Sequence: Synthetic peptide
  MOD_RES (4)..(4): phosphorylated serine
KLSSLGNLKFFRKNLLRLTG

SEQ ID NO: 3627 - protein, 21 aa, Artificial Sequence
  Description of Artificial Sequence: Synthetic peptide
  MOD_RES (4)..(4): phosphorylated serine
KLSSLGNLKKFFRKNLLRLTG

SEQ ID NO: 3628 - protein, 21 aa, Artificial Sequence
  Description of Artificial Sequence: Synthetic peptide
  MOD_RES (4)..(4): phosphorylated serine
KLSSLGNLKYFFRKNLLRLTG

SEQ ID NO: 3629 - protein, 21 aa, Artificial Sequence
  Description of Artificial Sequence: Synthetic peptide
  MOD_RES (4)..(4): phosphorylated serine
KLSSPRGGMKFFRKNLLRLTG

SEQ ID NO: 3630 - protein, 22 aa, Artificial Sequence
  Description of Artificial Sequence: Synthetic peptide
  MOD_RES (4)..(4): phosphorylated serine
KLSSPRGGMKKFFRKNLLRLTG

SEQ ID NO: 3631 - protein, 22 aa, Artificial Sequence
  Description of Artificial Sequence: Synthetic peptide
  MOD_RES (4)..(4): phosphorylated serine
KLSSPRGGMKYFFRKNLLRLTG

SEQ ID NO: 3632 - protein, 26 aa, Artificial Sequence
  Description of Artificial Sequence: Synthetic peptide
  MOD_RES (3)..(3): phosphorylated serine
KLSVIAEDSESGKQNFFRKNLLRLTG

SEQ ID NO: 3633 - protein, 27 aa, Artificial Sequence
  Description of Artificial Sequence: Synthetic peptide
  MOD_RES (3)..(3): phosphorylated serine
KLSVIAEDSESGKQNPFFRKNLLRLTG

SEQ ID NO: 3634 - protein, 28 aa, Artificial Sequence
  Description of Artificial Sequence: Synthetic peptide
  MOD_RES (3)..(3): phosphorylated serine
KLSVIAEDSESGKQNPGFFRKNLLRLTG

SEQ ID NO: 3635 - protein, 24 aa, Artificial Sequence
  Description of Artificial Sequence: Synthetic peptide
  MOD_RES (9)..(9): phosphorylated serine
KLVSFHDDSDEDLFFRKNLLRLTG

SEQ ID NO: 3636 - protein, 21 aa, Artificial Sequence
  Description of Artificial Sequence: Synthetic peptide
  MOD_RES (4)..(4): phosphorylated serine
KLYSEIDIKVFFRKNLLRLTG

SEQ ID NO: 3637 - protein, 20 aa, Artificial Sequence
  Description of Artificial Sequence: Synthetic peptide
  MOD_RES (4)..(4): phosphorylated serine
KLYSGNMEKFFRKNLLRLTG

SEQ ID NO: 3638 - protein, 20 aa, Artificial Sequence
  Description of Artificial Sequence: Synthetic peptide
  MOD_RES (4)..(4): phosphorylated serine
KMASLLHQVFFRKNLLRLTG

SEQ ID NO: 3639 - protein, 21 aa, Artificial Sequence
  Description of Artificial Sequence: Synthetic peptide
  MOD_RES (4)..(4): phosphorylated serine
KMASPELERLFFRKNLLRLTG

SEQ ID NO: 3640 - protein, 21 aa, Artificial Sequence
  Description of Artificial Sequence: Synthetic peptide
  MOD_RES (4)..(4): phosphorylated serine
KMASPELERVFFRKNLLRLTG

SEQ ID NO: 3641 - protein, 21 aa, Artificial Sequence
  Description of Artificial Sequence: Synthetic peptide
  MOD_RES (6)..(6): phosphorylated serine
KMDIVSSQKVFFRKNLLRLTG

SEQ ID NO: 3642 - protein, 21 aa, Artificial Sequence
  Description of Artificial Sequence: Synthetic peptide
  MOD_RES (4)..(4): phosphorylated serine
KMDSFLDMQLFFRKNLLRLTG

SEQ ID NO: 3643 - protein, 21 aa, Artificial Sequence
  Description of Artificial Sequence: Synthetic peptide
  MOD_RES (4)..(4): phosphorylated serine
KMDSFLDMQVFFRKNLLRLTG

SEQ ID NO: 3644 - protein, 20 aa, Artificial Sequence
  Description of Artificial Sequence: Synthetic peptide
  MOD_RES (4)..(4): phosphorylated serine
KMDSPRVTVFFRKNLLRLTG

SEQ ID NO: 3645 - protein, 21 aa, Artificial Sequence
  Description of Artificial Sequence: Synthetic peptide
  MOD_RES (4)..(4): phosphorylated serine
KMDSPTKVKKFFRKNLLRLTG

SEQ ID NO: 3646 - protein, 21 aa, Artificial Sequence
  Description of Artificial Sequence: Synthetic peptide
  MOD_RES (6)..(6): phosphorylated threonine
KMFPDTPLALFFRKNLLRLTG

SEQ ID NO: 3647 - protein, 21 aa, Artificial Sequence
  Description of Artificial Sequence: Synthetic peptide
  MOD_RES (6)..(6): phosphorylated threonine
KMFPDTPLAVFFRKNLLRLTG

SEQ ID NO: 3648 - protein, 20 aa, Artificial Sequence
  Description of Artificial Sequence: Synthetic peptide
  MOD_RES (4)..(4): phosphorylated serine
KMFSGTVRKFFRKNLLRLTG

SEQ ID NO: 3649 - protein, 21 aa, Artificial Sequence
  Description of Artificial Sequence: Synthetic peptide
  MOD_RES (4)..(4): phosphorylated serine
KMFSGVFVKVFFRKNLLRLTG

SEQ ID NO: 3650 - protein, 20 aa, Artificial Sequence
  Description of Artificial Sequence: Synthetic peptide
  MOD_RES (4)..(4): phosphorylated serine
KMFSKQQGKFFRKNLLRLTG

SEQ ID NO: 3651 - protein, 20 aa, Artificial Sequence
  Description of Artificial Sequence: Synthetic peptide
  MOD_RES (4)..(4): phosphorylated serine
KMFSPAHKKFFRKNLLRLTG

SEQ ID NO: 3652 - protein, 22 aa, Artificial Sequence
  Description of Artificial Sequence: Synthetic peptide
  MOD_RES (4)..(4): phosphorylated serine
KMFSPSKEAELFFRKNLLRLTG

SEQ ID NO: 3653 - protein, 22 aa, Artificial Sequence
  Description of Artificial Sequence: Synthetic peptide
  MOD_RES (4)..(4): phosphorylated serine
KMFSPSKEAEVFFRKNLLRLTG

SEQ ID NO: 3654 - protein, 22 aa, Artificial Sequence
  Description of Artificial Sequence: Synthetic peptide
  MOD_RES (5)..(5): phosphorylated serine
KMHGSLARAGKFFRKNLLRLTG

SEQ ID NO: 3655 - protein, 22 aa, Artificial Sequence
  Description of Artificial Sequence: Synthetic peptide
  MOD_RES (7)..(7): phosphorylated serine
KMIDIVSSQKVFFRKNLLRLTG

SEQ ID NO: 3656 - protein, 20 aa, Artificial Sequence
  Description of Artificial Sequence: Synthetic peptide
  MOD_RES (8)..(8): phosphorylated serine
KMIDRTESLFFRKNLLRLTG

SEQ ID NO: 3657 - protein, 22 aa, Artificial Sequence
  Description of Artificial Sequence: Synthetic peptide
  MOD_RES (4)..(4): phosphorylated serine
KMISSSSLKEKFFRKNLLRLTG

SEQ ID NO: 3658 - protein, 21 aa, Artificial Sequence
  Description of Artificial Sequence: Synthetic peptide
  MOD_RES (4)..(4): phosphorylated serine
KMKSNPDFLKFFRKNLLRLTG

SEQ ID NO: 3659 - protein, 22 aa, Artificial Sequence
  Description of Artificial Sequence: Synthetic peptide
  MOD_RES (4)..(4): phosphorylated serine
KMKSNPDFLKKFFRKNLLRLTG

SEQ ID NO: 3660 - protein, 22 aa, Artificial Sequence
  Description of Artificial Sequence: Synthetic peptide
  MOD_RES (4)..(4): phosphorylated serine
KMKSNPDFLKYFFRKNLLRLTG

SEQ ID NO: 3661 - protein, 22 aa, Artificial Sequence
  Description of Artificial Sequence: Synthetic peptide
  MOD_RES (5)..(5): phosphorylated serine
KMKSSPLIEKKFFRKNLLRLTG

SEQ ID NO: 3662 - protein, 20 aa, Artificial Sequence
  Description of Artificial Sequence: Synthetic peptide
  MOD_RES (4)..(4): phosphorylated threonine
KMKTPLVAKFFRKNLLRLTG

SEQ ID NO: 3663 - protein, 20 aa, Artificial Sequence
  Description of Artificial Sequence: Synthetic peptide
  MOD_RES (4)..(4): phosphorylated threonine
KMKTPLVARFFRKNLLRLTG

SEQ ID NO: 3664 - protein, 24 aa, Artificial Sequence
  Description of Artificial Sequence: Synthetic peptide
  MOD_RES (9)..(9): phosphorylated serine
KMLDFGSLSNLQVFFRKNLLRLTG

SEQ ID NO: 3665 - protein, 24 aa, Artificial Sequence
  Description of Artificial Sequence: Synthetic peptide
  MOD_RES (9)..(9): phosphorylated serine
KMLDFGSLSNLQVFFRKNLLRLTG

SEQ ID NO: 3666 - protein, 20 aa, Artificial Sequence
  Description of Artificial Sequence: Synthetic peptide
  MOD_RES (8)..(8): phosphorylated serine
KMLQFYPSLFFRKNLLRLTG

SEQ ID NO: 3667 - protein, 21 aa, Artificial Sequence
  Description of Artificial Sequence: Synthetic peptide
  MOD_RES (4)..(4): phosphorylated serine
KMLSPSNEKLFFRKNLLRLTG

SEQ ID NO: 3668 - protein, 21 aa, Artificial Sequence
  Description of Artificial Sequence: Synthetic peptide
  MOD_RES (4)..(4): phosphorylated serine
KMLSPSNEKVFFRKNLLRLTG

SEQ ID NO: 3669 - protein, 21 aa, Artificial Sequence
  Description of Artificial Sequence: Synthetic peptide
  MOD_RES (9)..(9): phosphorylated threonine
KMLSSAQRTLFFRKNLLRLTG

SEQ ID NO: 3670 - protein, 21 aa, Artificial Sequence
  Description of Artificial Sequence: Synthetic peptide
  MOD_RES (9)..(9): phosphorylated threonine
KMLSSAQRTVFFRKNLLRLTG

SEQ ID NO: 3671 - protein, 20 aa, Artificial Sequence
  Description of Artificial Sequence: Synthetic peptide
  MOD_RES (4)..(4): phosphorylated serine
KMLSVERIKFFRKNLLRLTG

SEQ ID NO: 3672 - protein, 20 aa, Artificial Sequence
  Description of Artificial Sequence: Synthetic peptide
  MOD_RES (4)..(4): phosphorylated threonine
KMLTPIKEKFFRKNLLRLTG

SEQ ID NO: 3673 - protein, 20 aa, Artificial Sequence
  Description of Artificial Sequence: Synthetic peptide
  MOD_RES (8)..(8): phosphorylated serine
KMMAPDISVFFRKNLLRLTG

SEQ ID NO: 3674 - protein, 22 aa, Artificial Sequence
  Description of Artificial Sequence: Synthetic peptide
  MOD_RES (4)..(4): phosphorylated serine
KMMSPKADVKLFFRKNLLRLTG

SEQ ID NO: 3675 - protein, 22 aa, Artificial Sequence
  Description of Artificial Sequence: Synthetic peptide
  MOD_RES (4)..(4): phosphorylated serine
KMMSPKADVKVFFRKNLLRLTG

SEQ ID NO: 3676 - protein, 21 aa, Artificial Sequence
  Description of Artificial Sequence: Synthetic peptide
  MOD_RES (5)..(5): phosphorylated serine
KMPTSPLKMKFFRKNLLRLTG

SEQ ID NO: 3677 - protein, 21 aa, Artificial Sequence
  Description of Artificial Sequence: Synthetic peptide
  MOD_RES (5)..(5): phosphorylated threonine
KMPTTPVKAKFFRKNLLRLTG

SEQ ID NO: 3678 - protein, 21 aa, Artificial Sequence
  Description of Artificial Sequence: Synthetic peptide
  MOD_RES (5)..(5): phosphorylated threonine
KMPTTPVKAYFFRKNLLRLTG

SEQ ID NO: 3679 - protein, 20 aa, Artificial Sequence
  Description of Artificial Sequence: Synthetic peptide
  MOD_RES (4)..(4): phosphorylated serine
KMRSPFLQKFFRKNLLRLTG

SEQ ID NO: 3680 - protein, 21 aa, Artificial Sequence
  Description of Artificial Sequence: Synthetic peptide
  MOD_RES (5)..(5): phosphorylated serine
KMRSSPREAKFFRKNLLRLTG

SEQ ID NO: 3681 - protein, 20 aa, Artificial Sequence
  Description of Artificial Sequence: Synthetic peptide
  MOD_RES (5)..(5): phosphorylated serine
KMRTSPTFKFFRKNLLRLTG

SEQ ID NO: 3682 - protein, 20 aa, Artificial Sequence
  Description of Artificial Sequence: Synthetic peptide
  MOD_RES (4)..(4): phosphorylated serine
KMSSLGNLKFFRKNLLRLTG

SEQ ID NO: 3683 - protein, 21 aa, Artificial Sequence
  Description of Artificial Sequence: Synthetic peptide
  MOD_RES (4)..(4): phosphorylated serine
KMSSLGNLKKFFRKNLLRLTG

SEQ ID NO: 3684 - protein, 21 aa, Artificial Sequence
  Description of Artificial Sequence: Synthetic peptide
  MOD_RES (4)..(4): phosphorylated serine
KMSSLGNLKYFFRKNLLRLTG

SEQ ID NO: 3685 - protein, 21 aa, Artificial Sequence
  Description of Artificial Sequence: Synthetic peptide
  MOD_RES (4)..(4): phosphorylated serine
KMSSPRGGMKFFRKNLLRLTG

SEQ ID NO: 3686 - protein, 22 aa, Artificial Sequence
  Description of Artificial Sequence: Synthetic peptide
  MOD_RES (4)..(4): phosphorylated serine
KMSSPRGGMKKFFRKNLLRLTG

SEQ ID NO: 3687 - protein, 21 aa, Artificial Sequence
  Description of Artificial Sequence: Synthetic peptide
  MOD_RES (4)..(4): phosphorylated serine
KMYSEIDIKVFFRKNLLRLTG

SEQ ID NO: 3688 - protein, 20 aa, Artificial Sequence
  Description of Artificial Sequence: Synthetic peptide
  MOD_RES (4)..(4): phosphorylated serine
KMYSGNMEKFFRKNLLRLTG

SEQ ID NO: 3689 - protein, 19 aa, Artificial Sequence
  Description of Artificial Sequence: Synthetic peptide
  MOD_RES (4)..(4): phosphorylated serine
KNRSWKYNFFRKNLLRLTG

SEQ ID NO: 3690 - protein, 20 aa, Artificial Sequence
  Description of Artificial Sequence: Synthetic peptide
  MOD_RES (4)..(4): phosphorylated serine
KNRSWKYNQFFRKNLLRLTG

SEQ ID NO: 3691 - protein, 25 aa, Artificial Sequence
  Description of Artificial Sequence: Synthetic peptide
  MOD_RES (4)..(4): phosphorylated serine
KNRSWKYNQSISLRFFRKNLLRLTG

SEQ ID NO: 3692 - protein, 27 aa, Artificial Sequence
  Description of Artificial Sequence: Synthetic peptide
  MOD_RES (4)..(4): phosphorylated serine
KNRSWKYNQSISLRRPFFRKNLLRLTG

SEQ ID NO: 3693 - protein, 20 aa, Artificial Sequence
  Description of Artificial Sequence: Synthetic peptide
  MOD_RES (4)..(4): phosphorylated serine
KPASPARRFFFRKNLLRLTG

SEQ ID NO: 3694 - protein, 20 aa, Artificial Sequence
  Description of Artificial Sequence: Synthetic peptide
  MOD_RES (4)..(4): phosphorylated serine
KPASPARRLFFRKNLLRLTG

SEQ ID NO: 3695 - protein, 20 aa, Artificial Sequence
  Description of Artificial Sequence: Synthetic peptide
  MOD_RES (4)..(4): phosphorylated serine
KPASPARRMFFRKNLLRLTG

SEQ ID NO: 3696 - protein, 20 aa, Artificial Sequence
  Description of Artificial Sequence: Synthetic peptide
  MOD_RES (4)..(4): phosphorylated serine
KPASPARRVFFRKNLLRLTG

SEQ ID NO: 3697 - protein, 22 aa, Artificial Sequence
  Description of Artificial Sequence: Synthetic peptide
  MOD_RES (4)..(4): phosphorylated serine
KPASPKFIVTFFFRKNLLRLTG

SEQ ID NO: 3698 - protein, 22 aa, Artificial Sequence
  Description of Artificial Sequence: Synthetic peptide
  MOD_RES (4)..(4): phosphorylated serine
KPASPKFIVTLFFRKNLLRLTG

SEQ ID NO: 3699 - protein, 22 aa, Artificial Sequence
  Description of Artificial Sequence: Synthetic peptide
  MOD_RES (4)..(4): phosphorylated serine
KPASPKFIVTMFFRKNLLRLTG

SEQ ID NO: 3700 - protein, 22 aa, Artificial Sequence
  Description of Artificial Sequence: Synthetic peptide
  MOD_RES (4)..(4): phosphorylated serine
KPASPKFIVTVFFRKNLLRLTG

SEQ ID NO: 3701 - protein, 20 aa, Artificial Sequence
  Description of Artificial Sequence: Synthetic peptide
  MOD_RES (4)..(4): phosphorylated serine
KPESRRSSLFFRKNLLRLTG

SEQ ID NO: 3702 - protein, 21 aa, Artificial Sequence
  Description of Artificial Sequence: Synthetic peptide
  MOD_RES (4)..(4): phosphorylated serine
  MOD_RES (7)..(7): phosphorylated serine
KPESRRSSLLFFRKNLLRLTG

SEQ ID NO: 3703 - protein, 21 aa, Artificial Sequence
  Description of Artificial Sequence: Synthetic peptide
  MOD_RES (4)..(4): phosphorylated serine
  MOD_RES (8)..(8): phosphorylated serine
KPESRRSSLLFFRKNLLRLTG

SEQ ID NO: 3704 - protein, 21 aa, Artificial Sequence
  Description of Artificial Sequence: Synthetic peptide
  MOD_RES (4)..(4): phosphorylated serine
KPESRRSSLLFFRKNLLRLTG

SEQ ID NO: 3705 - protein, 20 aa, Artificial Sequence
  Description of Artificial Sequence: Synthetic peptide
  MOD_RES (6)..(6): phosphorylated serine
KPLIRSQSLFFRKNLLRLTG

SEQ ID NO: 3706 - protein, 20 aa, Artificial Sequence
  Description of Artificial Sequence: Synthetic peptide
  MOD_RES (8)..(8): phosphorylated serine
KPLIRSQSLFFRKNLLRLTG

SEQ ID NO: 3707 - protein, 20 aa, Artificial Sequence
  Description of Artificial Sequence: Synthetic peptide
  MOD_RES (5)..(5): phosphorylated serine
KPPHSPLVFFFRKNLLRLTG

SEQ ID NO: 3708 - protein, 20 aa, Artificial Sequence
  Description of Artificial Sequence: Synthetic peptide
  MOD_RES (5)..(5): phosphorylated serine
KPPHSPLVLFFRKNLLRLTG

SEQ ID NO: 3709 - protein, 20 aa, Artificial Sequence
  Description of Artificial Sequence: Synthetic peptide
  MOD_RES (5)..(5): phosphorylated serine
KPPHSPLVMFFRKNLLRLTG

SEQ ID NO: 3710 - protein, 20 aa, Artificial Sequence
  Description of Artificial Sequence: Synthetic peptide
  MOD_RES (5)..(5): phosphorylated serine
KPPHSPLVVFFRKNLLRLTG

SEQ ID NO: 3711 - protein, 21 aa, Artificial Sequence
  Description of Artificial Sequence: Synthetic peptide
  MOD_RES (4)..(4): phosphorylated serine
KPPSPEHQSFFFRKNLLRLTG

SEQ ID NO: 3712 - protein, 21 aa, Artificial Sequence
  Description of Artificial Sequence: Synthetic peptide
  MOD_RES (4)..(4): phosphorylated serine
KPPSPEHQSLFFRKNLLRLTG

SEQ ID NO: 3713 - protein, 21 aa, Artificial Sequence
  Description of Artificial Sequence: Synthetic peptide
  MOD_RES (4)..(4): phosphorylated serine
KPPSPEHQSMFFRKNLLRLTG

SEQ ID NO: 3714 - protein, 21 aa, Artificial Sequence
  Description of Artificial Sequence: Synthetic peptide
  MOD_RES (4)..(4): phosphorylated serine
KPPSPEHQSVFFRKNLLRLTG

SEQ ID NO: 3715 - protein, 21 aa, Artificial Sequence
  Description of Artificial Sequence: Synthetic peptide
  MOD_RES (4)..(4): phosphorylated serine
KPPSPSPIEFFFRKNLLRLTG

SEQ ID NO: 3716 - protein, 21 aa, Artificial Sequence
  Description of Artificial Sequence: Synthetic peptide
  MOD_RES (4)..(4): phosphorylated serine
KPPSPSPIELFFRKNLLRLTG

SEQ ID NO: 3717 - protein, 21 aa, Artificial Sequence
  Description of Artificial Sequence: Synthetic peptide
  MOD_RES (4)..(4): phosphorylated serine
KPPSPSPIEMFFRKNLLRLTG

SEQ ID NO: 3718 - protein, 21 aa, Artificial Sequence
  Description of Artificial Sequence: Synthetic peptide
  MOD_RES (4)..(4): phosphorylated serine
KPPSPSPIEVFFRKNLLRLTG

SEQ ID NO: 3719 - protein, 20 aa, Artificial Sequence
  Description of Artificial Sequence: Synthetic peptide
  MOD_RES (4)..(4): phosphorylated threonine
KPPTPGASFFFRKNLLRLTG

SEQ ID NO: 3720 - protein, 20 aa, Artificial Sequence
  Description of Artificial Sequence: Synthetic peptide
  MOD_RES (4)..(4): phosphorylated threonine
KPPTPGASLFFRKNLLRLTG

SEQ ID NO: 3721 - protein, 20 aa, Artificial Sequence
  Description of Artificial Sequence: Synthetic peptide
  MOD_RES (4)..(4): phosphorylated threonine
KPPTPGASMFFRKNLLRLTG

SEQ ID NO: 3722 - protein, 20 aa, Artificial Sequence
  Description of Artificial Sequence: Synthetic peptide
  MOD_RES (4)..(4): phosphorylated threonine
KPPTPGASVFFRKNLLRLTG

SEQ ID NO: 3723 - protein, 20 aa, Artificial Sequence
  Description of Artificial Sequence: Synthetic peptide
  MOD_RES (8)..(8): phosphorylated serine
KPPYRSHSFFFRKNLLRLTG

SEQ ID NO: 3724 - protein, 20 aa, Artificial Sequence
  Description of Artificial Sequence: Synthetic peptide
  MOD_RES (8)..(8): phosphorylated serine
KPPYRSHSLFFRKNLLRLTG

SEQ ID NO: 3725 - protein, 20 aa, Artificial Sequence
  Description of Artificial Sequence: Synthetic peptide
  MOD_RES (8)..(8): phosphorylated serine
KPPYRSHSMFFRKNLLRLTG

SEQ ID NO: 3726 - protein, 20 aa, Artificial Sequence
  Description of Artificial Sequence: Synthetic peptide
  MOD_RES (8)..(8): phosphorylated serine
KPPYRSHSVFFRKNLLRLTG

SEQ ID NO: 3727 - protein, 20 aa, Artificial Sequence
  Description of Artificial Sequence: Synthetic peptide
  MOD_RES (8)..(8): phosphorylated threonine
KPQTRGKTFFFRKNLLRLTG

SEQ ID NO: 3728 - protein, 20 aa, Artificial Sequence
  Description of Artificial Sequence: Synthetic peptide
  MOD_RES (8)..(8): phosphorylated threonine
KPQTRGKTLFFRKNLLRLTG

SEQ ID NO: 3729 - protein, 20 aa, Artificial Sequence
  Description of Artificial Sequence: Synthetic peptide
  MOD_RES (8)..(8): phosphorylated threonine
KPQTRGKTMFFRKNLLRLTG

SEQ ID NO: 3730 - protein, 20 aa, Artificial Sequence
  Description of Artificial Sequence: Synthetic peptide
  MOD_RES (8)..(8): phosphorylated threonine
KPQTRGKTVFFRKNLLRLTG

SEQ ID NO: 3731 - protein, 20 aa, Artificial Sequence
  Description of Artificial Sequence: Synthetic peptide
  MOD_RES (6)..(6): phosphorylated serine
KPRPLSMDLFFRKNLLRLTG

SEQ ID NO: 3732 - protein, 20 aa, Artificial Sequence
  Description of Artificial Sequence: Synthetic peptide
  MOD_RES (8)..(8): phosphorylated serine
KPRPPPLSFFFRKNLLRLTG

SEQ ID NO: 3733 - protein, 20 aa, Artificial Sequence
  Description of Artificial Sequence: Synthetic peptide
  MOD_RES (8)..(8): phosphorylated serine
KPRPPPLSLFFRKNLLRLTG

SEQ ID NO: 3734 - protein, 20 aa, Artificial Sequence
  Description of Artificial Sequence: Synthetic peptide
  MOD_RES (8)..(8): phosphorylated serine
KPRPPPLSMFFRKNLLRLTG

SEQ ID NO: 3735 - protein, 20 aa, Artificial Sequence
  Description of Artificial Sequence: Synthetic peptide
  MOD_RES (8)..(8): phosphorylated serine
KPRPPPLSPFFRKNLLRLTG

SEQ ID NO: 3736 - protein, 20 aa, Artificial Sequence
  Description of Artificial Sequence: Synthetic peptide
  MOD_RES (8)..(8): phosphorylated serine
KPRPPPLSVFFRKNLLRLTG

SEQ ID NO: 3737 - protein, 20 aa, Artificial Sequence
  Description of Artificial Sequence: Synthetic peptide
  MOD_RES (6)..(6): phosphorylated serine
  MOD_RES (8)..(8): phosphorylated serine
KPRRFSRSLFFRKNLLRLTG

SEQ ID NO: 3738 - protein, 20 aa, Artificial Sequence
  Description of Artificial Sequence: Synthetic peptide
  MOD_RES (6)..(6): phosphorylated serine
KPRRFSRSLFFRKNLLRLTG

SEQ ID NO: 3739 - protein, 20 aa, Artificial Sequence
  Description of Artificial Sequence: Synthetic peptide
  MOD_RES (4)..(4): phosphorylated serine
KPRSPDHVFFFRKNLLRLTG

SEQ ID NO: 3740 - protein, 20 aa, Artificial Sequence
  Description of Artificial Sequence: Synthetic peptide
  MOD_RES (4)..(4): phosphorylated serine
KPRSPDHVLFFRKNLLRLTG

SEQ ID NO: 3741 - protein, 20 aa, Artificial Sequence
  Description of Artificial Sequence: Synthetic peptide
  MOD_RES (4)..(4): phosphorylated serine
KPRSPDHVMFFRKNLLRLTG

SEQ ID NO: 3742 - protein, 20 aa, Artificial Sequence
  Description of Artificial Sequence: Synthetic peptide
  MOD_RES (4)..(4): phosphorylated serine
KPRSPDHVVFFRKNLLRLTG

SEQ ID NO: 3743 - protein, 20 aa, Artificial Sequence
  Description of Artificial Sequence: Synthetic peptide
  MOD_RES (4)..(4): phosphorylated serine
KPRSPFSKIFFRKNLLRLTG

SEQ ID NO: 3744 - protein, 20 aa, Artificial Sequence
  Description of Artificial Sequence: Synthetic peptide
  MOD_RES (4)..(4): phosphorylated serine
KPRSPPRAFFFRKNLLRLTG

SEQ ID NO: 3745 - protein, 20 aa, Artificial Sequence
  Description of Artificial Sequence: Synthetic peptide
  MOD_RES (4)..(4): phosphorylated serine
KPRSPPRALFFRKNLLRLTG

SEQ ID NO: 3746 - protein, 21 aa, Artificial Sequence
  Description of Artificial Sequence: Synthetic peptide
  MOD_RES (4)..(4): phosphorylated serine
KPRSPPRALFFFRKNLLRLTG

SEQ ID NO: 3747 - protein, 21 aa, Artificial Sequence
  Description of Artificial Sequence: Synthetic peptide
  MOD_RES (4)..(4): phosphorylated serine
KPRSPPRALLFFRKNLLRLTG

SEQ ID NO: 3748 - protein, 21 aa, Artificial Sequence
  Description of Artificial Sequence: Synthetic peptide
  MOD_RES (4)..(4): phosphorylated serine
KPRSPPRALMFFRKNLLRLTG

SEQ ID NO: 3749 - protein, 21 aa, Artificial Sequence
  Description of Artificial Sequence: Synthetic peptide
  MOD_RES (4)..(4): phosphorylated serine
KPRSPPRALVFFRKNLLRLTG

SEQ ID NO: 3750 - protein, 22 aa, Artificial Sequence
  Description of Artificial Sequence: Synthetic peptide
  MOD_RES (4)..(4): phosphorylated serine
KPRSPPRALVFFFRKNLLRLTG

SEQ ID NO: 3751 - protein, 22 aa, Artificial Sequence
  Description of Artificial Sequence: Synthetic peptide
  MOD_RES (4)..(4): phosphorylated serine
KPRSPPRALVLFFRKNLLRLTG

SEQ ID NO: 3752 - protein, 23 aa, Artificial Sequence
  Description of Artificial Sequence: Synthetic peptide
  MOD_RES (4)..(4): phosphorylated serine
KPRSPPRALVLFFFRKNLLRLTG

SEQ ID NO: 3753 - protein, 23 aa, Artificial Sequence
  Description of Artificial Sequence: Synthetic peptide
  MOD_RES (4)..(4): phosphorylated serine
KPRSPPRALVLLFFRKNLLRLTG

SEQ ID NO: 3754 - protein, 23 aa, Artificial Sequence
  Description of Artificial Sequence: Synthetic peptide
  MOD_RES (4)..(4): phosphorylated serine
KPRSPPRALVLMFFRKNLLRLTG

SEQ ID NO: 3755 - protein, 23 aa, Artificial Sequence
  Description of Artificial Sequence: Synthetic peptide
  MOD_RES (4)..(4): phosphorylated serine
KPRSPPRALVLPFFRKNLLRLTG

SEQ ID NO: 3756 - protein, 23 aa, Artificial Sequence
  Description of Artificial Sequence: Synthetic peptide
  MOD_RES (4)..(4): phosphorylated serine
KPRSPPRALVLVFFRKNLLRLTG

SEQ ID NO: 3757 - protein, 22 aa, Artificial Sequence
  Description of Artificial Sequence: Synthetic peptide
  MOD_RES (4)..(4): phosphorylated serine
KPRSPPRALVMFFRKNLLRLTG

SEQ ID NO: 3758 - protein, 22 aa, Artificial Sequence
  Description of Artificial Sequence: Synthetic peptide
  MOD_RES (4)..(4): phosphorylated serine
KPRSPPRALVVFFRKNLLRLTG

SEQ ID NO: 3759 - protein, 20 aa, Artificial Sequence
  Description of Artificial Sequence: Synthetic peptide
  MOD_RES (4)..(4): phosphorylated serine
KPRSPPRAMFFRKNLLRLTG

SEQ ID NO: 3760 - protein, 20 aa, Artificial Sequence
  Description of Artificial Sequence: Synthetic peptide
  MOD_RES (4)..(4): phosphorylated serine
KPRSPPRAVFFRKNLLRLTG

SEQ ID NO: 3761 - protein, 20 aa, Artificial Sequence
  Description of Artificial Sequence: Synthetic peptide
  MOD_RES (4)..(4): phosphorylated serine
KPRSPVVEFFFRKNLLRLTG

SEQ ID NO: 3762 - protein, 20 aa, Artificial Sequence
  Description of Artificial Sequence: Synthetic peptide
  MOD_RES (4)..(4): phosphorylated serine
KPRSPVVELFFRKNLLRLTG

SEQ ID NO: 3763 - protein, 20 aa, Artificial Sequence
  Description of Artificial Sequence: Synthetic peptide
  MOD_RES (4)..(4): phosphorylated serine
KPRSPVVEMFFRKNLLRLTG

SEQ ID NO: 3764 - protein, 20 aa, Artificial Sequence
  Description of Artificial Sequence: Synthetic peptide
  MOD_RES (4)..(4): phosphorylated serine
KPRSPVVEVFFRKNLLRLTG

SEQ ID NO: 3765 - protein, 20 aa, Artificial Sequence
  Description of Artificial Sequence: Synthetic peptide
  MOD_RES (4)..(4): phosphorylated serine
KPSSPRGSLFFRKNLLRLTG

SEQ ID NO: 3766 - protein, 21 aa, Artificial Sequence
  Description of Artificial Sequence: Synthetic peptide
  MOD_RES (4)..(4): phosphorylated serine
KPSSPRGSLLFFRKNLLRLTG

SEQ ID NO: 3767 - protein, 21 aa, Artificial Sequence
  Description of Artificial Sequence: Synthetic peptide
  MOD_RES (4)..(4): phosphorylated serine
KPVSPKSGTLFFRKNLLRLTG

SEQ ID NO: 3768 - protein, 20 aa, Artificial Sequence
  Description of Artificial Sequence: Synthetic peptide
  MOD_RES (4)..(4): phosphorylated serine
KPYSPLASFFFRKNLLRLTG

SEQ ID NO: 3769 - protein, 20 aa, Artificial Sequence
  Description of Artificial Sequence: Synthetic peptide
  MOD_RES (4)..(4): phosphorylated serine
KPYSPLASLFFRKNLLRLTG

SEQ ID NO: 3770 - protein, 20 aa, Artificial Sequence
  Description of Artificial Sequence: Synthetic peptide
  MOD_RES (4)..(4): phosphorylated serine
KPYSPLASMFFRKNLLRLTG

SEQ ID NO: 3771 - protein, 20 aa, Artificial Sequence
  Description of Artificial Sequence: Synthetic peptide
  MOD_RES (4)..(4): phosphorylated serine
KPYSPLASVFFRKNLLRLTG

SEQ ID NO: 3772 - protein, 20 aa, Artificial Sequence
  Description of Artificial Sequence: Synthetic peptide
  MOD_RES (4)..(4): phosphorylated serine
KQDSLVINLFFRKNLLRLTG

SEQ ID NO: 3773 - protein, 20 aa, Artificial Sequence
  Description of Artificial Sequence: Synthetic peptide
  MOD_RES (4)..(4): phosphorylated serine
KRASFAKSFFFRKNLLRLTG

SEQ ID NO: 3774 - protein, 20 aa, Artificial Sequence
  Description of Artificial Sequence: Synthetic peptide
  MOD_RES (4)..(4): phosphorylated serine
KRASFAKSKFFRKNLLRLTG

SEQ ID NO: 3775 - protein, 20 aa, Artificial Sequence
  Description of Artificial Sequence: Synthetic peptide
  MOD_RES (4)..(4): phosphorylated serine
KRASFAKSLFFRKNLLRLTG

SEQ ID NO: 3776 - protein, 20 aa, Artificial Sequence
  Description of Artificial Sequence: Synthetic peptide
  MOD_RES (4)..(4): phosphorylated serine
KRASFAKSMFFRKNLLRLTG

SEQ ID NO: 3777 - protein, 20 aa, Artificial Sequence
  Description of Artificial Sequence: Synthetic peptide
  MOD_RES (4)..(4): phosphorylated serine
KRASFAKSRFFRKNLLRLTG

SEQ ID NO: 3778 - protein, 20 aa, Artificial Sequence
  Description of Artificial Sequence: Synthetic peptide
  MOD_RES (4)..(4): phosphorylated serine
KRASFAKSVFFRKNLLRLTG

SEQ ID NO: 3779 - protein, 20 aa, Artificial Sequence
  Description of Artificial Sequence: Synthetic peptide
  MOD_RES (4)..(4): phosphorylated serine
KRASFAKSYFFRKNLLRLTG

SEQ ID NO: 3780 - protein, 21 aa, Artificial Sequence
  Description of Artificial Sequence: Synthetic peptide
  MOD_RES (4)..(4): phosphorylated serine
KRASGQAFEFFFRKNLLRLTG

SEQ ID NO: 3781 - protein, 21 aa, Artificial Sequence
  Description of Artificial Sequence: Synthetic peptide
  MOD_RES (4)..(4): phosphorylated serine
KRASGQAFEKFFRKNLLRLTG

SEQ ID NO: 3782 - protein, 21 aa, Artificial Sequence
  Description of Artificial Sequence: Synthetic peptide
  MOD_RES (4)..(4): phosphorylated serine
KRASGQAFELFFRKNLLRLTG

SEQ ID NO: 3783 - protein, 21 aa, Artificial Sequence
  Description of Artificial Sequence: Synthetic peptide
  MOD_RES (4)..(4): phosphorylated serine
KRASGQAFERFFRKNLLRLTG

SEQ ID NO: 3784 - protein, 21 aa, Artificial Sequence
  Description of Artificial Sequence: Synthetic peptide
  MOD_RES (4)..(4): phosphorylated serine
KRASGQAFEYFFRKNLLRLTG

SEQ ID NO: 3785 - protein, 20 aa, Artificial Sequence
  Description of Artificial Sequence: Synthetic peptide
  MOD_RES (5)..(5): phosphorylated serine
KRASSPFRFFFRKNLLRLTG

SEQ ID NO: 3786 - protein, 20 aa, Artificial Sequence
  Description of Artificial Sequence: Synthetic peptide
  MOD_RES (5)..(5): phosphorylated serine
KRASSPFRKFFRKNLLRLTG

SEQ ID NO: 3787 - protein, 20 aa, Artificial Sequence
  Description of Artificial Sequence: Synthetic peptide
  MOD_RES (5)..(5): phosphorylated serine
KRASSPFRLFFRKNLLRLTG

SEQ ID NO: 3788 - protein, 20 aa, Artificial Sequence
  Description of Artificial Sequence: Synthetic peptide
  MOD_RES (5)..(5): phosphorylated serine
KRASSPFRMFFRKNLLRLTG

SEQ ID NO: 3789 - protein, 20 aa, Artificial Sequence
  Description of Artificial Sequence: Synthetic peptide
  MOD_RES (5)..(5): phosphorylated serine
KRASSPFRRFFRKNLLRLTG

SEQ ID NO: 3790 - protein, 20 aa, Artificial Sequence
  Description of Artificial Sequence: Synthetic peptide
  MOD_RES (5)..(5): phosphorylated serine
KRASSPFRYFFRKNLLRLTG

SEQ ID NO: 3791 - protein, 20 aa, Artificial Sequence
  Description of Artificial Sequence: Synthetic peptide
  MOD_RES (4)..(4): phosphorylated serine
KRASVFVKFFFRKNLLRLTG

SEQ ID NO: 3792 - protein, 20 aa, Artificial Sequence
  Description of Artificial Sequence: Synthetic peptide
  MOD_RES (4)..(4): phosphorylated serine
KRASVFVKKFFRKNLLRLTG

SEQ ID NO: 3793 - protein, 20 aa, Artificial Sequence
  Description of Artificial Sequence: Synthetic peptide
  MOD_RES (4)..(4): phosphorylated serine
KRASVFVKLFFRKNLLRLTG

SEQ ID NO: 3794 - protein, 20 aa, Artificial Sequence
  Description of Artificial Sequence: Synthetic peptide
  MOD_RES (4)..(4): phosphorylated serine
KRASVFVKMFFRKNLLRLTG

SEQ ID NO: 3795 - protein, 20 aa, Artificial Sequence
  Description of Artificial Sequence: Synthetic peptide
  MOD_RES (4)..(4): phosphorylated serine
KRASVFVKRFFRKNLLRLTG

SEQ ID NO: 3796 - protein, 20 aa, Artificial Sequence
  Description of Artificial Sequence: Synthetic peptide
  MOD_RES (4)..(4): phosphorylated serine
KRASVFVKYFFRKNLLRLTG

SEQ ID NO: 3797 - protein, 20 aa, Artificial Sequence
  Description of Artificial Sequence: Synthetic peptide
  MOD_RES (4)..(4): phosphorylated serine
KRASYILRLFFRKNLLRLTG

SEQ ID NO: 3798 - protein, 18 aa, Artificial Sequence
  Description of Artificial Sequence: Synthetic peptide
  MOD_RES (4)..(4): phosphorylated serine
KRFSFKFFFRKNLLRLTG

SEQ ID NO: 3799 - protein, 18 aa, Artificial Sequence
  Description of Artificial Sequence: Synthetic peptide
  MOD_RES (4)..(4): phosphorylated serine
KRFSFKKFFRKNLLRLTG

SEQ ID NO: 3800 - protein, 20 aa, Artificial Sequence
  Description of Artificial Sequence: Synthetic peptide
  MOD_RES (4)..(4): phosphorylated serine
  MOD_RES (8)..(8): phosphorylated serine
KRFSFKKSFFFRKNLLRLTG

SEQ ID NO: 3801 - protein, 20 aa, Artificial Sequence
  Description of Artificial Sequence: Synthetic peptide
  MOD_RES (4)..(4): phosphorylated serine
KRFSFKKSFFFRKNLLRLTG

SEQ ID NO: 3802 - protein, 20 aa, Artificial Sequence
  Description of Artificial Sequence: Synthetic peptide
  MOD_RES (4)..(4): phosphorylated serine
KRFSFKKSKFFRKNLLRLTG

SEQ ID NO: 3803 - protein, 20 aa, Artificial Sequence
  Description of Artificial Sequence: Synthetic peptide
  MOD_RES (4)..(4): phosphorylated serine
KRFSFKKSLFFRKNLLRLTG

SEQ ID NO: 3804 - protein, 20 aa, Artificial Sequence
  Description of Artificial Sequence: Synthetic peptide
  MOD_RES (4)..(4): phosphorylated serine
KRFSFKKSMFFRKNLLRLTG

SEQ ID NO: 3805 - protein, 20 aa, Artificial Sequence
  Description of Artificial Sequence: Synthetic peptide
  MOD_RES (4)..(4): phosphorylated serine
KRFSFKKSRFFRKNLLRLTG

SEQ ID NO: 3806 - protein, 20 aa, Artificial Sequence
  Description of Artificial Sequence: Synthetic peptide
  MOD_RES (4)..(4): phosphorylated serine
KRFSFKKSYFFRKNLLRLTG

SEQ ID NO: 3807 - protein, 18 aa, Artificial Sequence
  Description of Artificial Sequence: Synthetic peptide
  MOD_RES (4)..(4): phosphorylated serine
KRFSFKLFFRKNLLRLTG

SEQ ID NO: 3808 - protein, 18 aa, Artificial Sequence
  Description of Artificial Sequence: Synthetic peptide
  MOD_RES (4)..(4): phosphorylated serine
KRFSFKMFFRKNLLRLTG

SEQ ID NO: 3809 - protein, 18 aa, Artificial Sequence
  Description of Artificial Sequence: Synthetic peptide
  MOD_RES (4)..(4): phosphorylated serine
KRFSFKRFFRKNLLRLTG

SEQ ID NO: 3810 - protein, 20 aa, Artificial Sequence
  Description of Artificial Sequence: Synthetic peptide
  MOD_RES (4)..(4): phosphorylated serine
  MOD_RES (7)..(7): phosphorylated serine
KRFSFKSSFFFRKNLLRLTG

SEQ ID NO: 3811 - protein, 18 aa, Artificial Sequence
  Description of Artificial Sequence: Synthetic peptide
  MOD_RES (4)..(4): phosphorylated serine
KRFSFKYFFRKNLLRLTG

SEQ ID NO: 3812 - protein, 20 aa, Artificial Sequence
  Description of Artificial Sequence: Synthetic peptide
  MOD_RES (4)..(4): phosphorylated serine
KRFSGTVRFFFRKNLLRLTG

SEQ ID NO: 3813 - protein, 20 aa, Artificial Sequence
  Description of Artificial Sequence: Synthetic peptide
  MOD_RES (4)..(4): phosphorylated serine
KRFSGTVRKFFRKNLLRLTG

SEQ ID NO: 3814 - protein, 20 aa, Artificial Sequence
  Description of Artificial Sequence: Synthetic peptide
  MOD_RES (4)..(4): phosphorylated serine
KRFSGTVRLFFRKNLLRLTG

SEQ ID NO: 3815 - protein, 20 aa, Artificial Sequence
  Description of Artificial Sequence: Synthetic peptide
  MOD_RES (4)..(4): phosphorylated serine
KRFSGTVRMFFRKNLLRLTG

SEQ ID NO: 3816 - protein, 20 aa, Artificial Sequence
  Description of Artificial Sequence: Synthetic peptide
  MOD_RES (4)..(4): phosphorylated serine
KRFSGTVRRFFRKNLLRLTG

SEQ ID NO: 3817 - protein, 20 aa, Artificial Sequence
  Description of Artificial Sequence: Synthetic peptide
  MOD_RES (4)..(4): phosphorylated serine
KRFSGTVRYFFRKNLLRLTG

SEQ ID NO: 3818 - protein, 21 aa, Artificial Sequence
  Description of Artificial Sequence: Synthetic peptide
  MOD_RES (6)..(6): phosphorylated serine
KRIVISPKPFFFRKNLLRLTG

SEQ ID NO: 3819 - protein, 20 aa, Artificial Sequence
  Description of Artificial Sequence: Synthetic peptide
  MOD_RES (4)..(4): phosphorylated serine
KRKSFTSLYFFRKNLLRLTG

SEQ ID NO: 3820 - protein, 20 aa, Artificial Sequence
  Description of Artificial Sequence: Synthetic peptide
  MOD_RES (6)..(6): phosphorylated serine
KRLEKSPSFFFRKNLLRLTG

SEQ ID NO: 3821 - protein, 20 aa, Artificial Sequence
  Description of Artificial Sequence: Synthetic peptide
  MOD_RES (8)..(8): phosphorylated serine
KRLEKSPSFFFRKNLLRLTG

SEQ ID NO: 3822 - protein, 20 aa, Artificial Sequence
  Description of Artificial Sequence: Synthetic peptide
  MOD_RES (4)..(4): phosphorylated serine
KRLSPAPQFFFRKNLLRLTG

SEQ ID NO: 3823 - protein, 20 aa, Artificial Sequence
  Description of Artificial Sequence: Synthetic peptide
  MOD_RES (4)..(4): phosphorylated serine
KRLSPAPQKFFRKNLLRLTG

SEQ ID NO: 3824 - protein, 20 aa, Artificial Sequence
  Description of Artificial Sequence: Synthetic peptide
  MOD_RES (4)..(4): phosphorylated serine
KRLSPAPQLFFRKNLLRLTG

SEQ ID NO: 3825 - protein, 20 aa, Artificial Sequence
  Description of Artificial Sequence: Synthetic peptide
  MOD_RES (4)..(4): phosphorylated serine
KRLSPAPQMFFRKNLLRLTG

SEQ ID NO: 3826 - protein, 20 aa, Artificial Sequence
  Description of Artificial Sequence: Synthetic peptide
  MOD_RES (4)..(4): phosphorylated serine
KRLSPAPQRFFRKNLLRLTG

SEQ ID NO: 3827 - protein, 20 aa, Artificial Sequence
  Description of Artificial Sequence: Synthetic peptide
  MOD_RES (4)..(4): phosphorylated serine
KRLSPAPQYFFRKNLLRLTG

SEQ ID NO: 3828 - protein, 21 aa, Artificial Sequence
  Description of Artificial Sequence: Synthetic peptide
  MOD_RES (4)..(4): phosphorylated serine
KRLSTSPVRLFFRKNLLRLTG

SEQ ID NO: 3829 - protein, 20 aa, Artificial Sequence
  Description of Artificial Sequence: Synthetic peptide
  MOD_RES (4)..(4): phosphorylated serine
KRLSVERIFFFRKNLLRLTG

SEQ ID NO: 3830 - protein, 20 aa, Artificial Sequence
  Description of Artificial Sequence: Synthetic peptide
  MOD_RES (4)..(4): phosphorylated serine
KRLSVERIKFFRKNLLRLTG

SEQ ID NO: 3831 - protein, 20 aa, Artificial Sequence
  Description of Artificial Sequence: Synthetic peptide
  MOD_RES (4)..(4): phosphorylated serine
KRLSVERILFFRKNLLRLTG

SEQ ID NO: 3832 - protein, 20 aa, Artificial Sequence
  Description of Artificial Sequence: Synthetic peptide
  MOD_RES (4)..(4): phosphorylated serine
KRLSVERIMFFRKNLLRLTG

SEQ ID NO: 3833 - protein, 20 aa, Artificial Sequence
  Description of Artificial Sequence: Synthetic peptide
  MOD_RES (4)..(4): phosphorylated serine
KRLSVERIRFFRKNLLRLTG

SEQ ID NO: 3834 - protein, 20 aa, Artificial Sequence
  Description of Artificial Sequence: Synthetic peptide
  MOD_RES (4)..(4): phosphorylated serine
KRLSVERIYFFRKNLLRLTG

SEQ ID NO: 3835 - protein, 19 aa, Artificial Sequence
  Description of Artificial Sequence: Synthetic peptide
  MOD_RES (4)..(4): phosphorylated serine
KRMSPKEFFFRKNLLRLTG

SEQ ID NO: 3836 - protein, 19 aa, Artificial Sequence
  Description of Artificial Sequence: Synthetic peptide
  MOD_RES (4)..(4): phosphorylated serine
KRMSPKEKFFRKNLLRLTG

SEQ ID NO: 3837 - protein, 19 aa, Artificial Sequence
  Description of Artificial Sequence: Synthetic peptide
  MOD_RES (4)..(4): phosphorylated serine
KRMSPKELFFRKNLLRLTG

SEQ ID NO: 3838 - protein, 19 aa, Artificial Sequence
  Description of Artificial Sequence: Synthetic peptide
  MOD_RES (4)..(4): phosphorylated serine
KRMSPKERFFRKNLLRLTG

SEQ ID NO: 3839 - protein, 19 aa, Artificial Sequence
  Description of Artificial Sequence: Synthetic peptide
  MOD_RES (4)..(4): phosphorylated serine
KRMSPKEYFFRKNLLRLTG

SEQ ID NO: 3840 - protein, 20 aa, Artificial Sequence
  Description of Artificial Sequence: Synthetic peptide
  MOD_RES (3)..(3): oxidized methionine
  MOD_RES (4)..(4): phosphorylated serine
KRMSPKPELFFRKNLLRLTG

SEQ ID NO: 3841 - protein, 20 aa, Artificial Sequence
  Description of Artificial Sequence: Synthetic peptide
  MOD_RES (4)..(4): phosphorylated serine
KRMSPKPELFFRKNLLRLTG

SEQ ID NO: 3842 - protein, 19 aa, Artificial Sequence
  Description of Artificial Sequence: Synthetic peptide
  MOD_RES (4)..(4): phosphorylated serine
KRMSPKPFFFRKNLLRLTG

SEQ ID NO: 3843 - protein, 19 aa, Artificial Sequence
  Description of Artificial Sequence: Synthetic peptide
  MOD_RES (4)..(4): phosphorylated serine
KRMSPKPKFFRKNLLRLTG

SEQ ID NO: 3844 - protein, 19 aa, Artificial Sequence
  Description of Artificial Sequence: Synthetic peptide
  MOD_RES (4)..(4): phosphorylated serine
KRMSPKPLFFRKNLLRLTG

SEQ ID NO: 3845 - protein, 19 aa, Artificial Sequence
  Description of Artificial Sequence: Synthetic peptide
  MOD_RES (4)..(4): phosphorylated serine
KRMSPKPMFFRKNLLRLTG

SEQ ID NO: 3846 - protein, 19 aa, Artificial Sequence
  Description of Artificial Sequence: Synthetic peptide
  MOD_RES (4)..(4): phosphorylated serine
KRMSPKPRFFRKNLLRLTG

SEQ ID NO: 3847 - protein, 19 aa, Artificial Sequence
  Description of Artificial Sequence: Synthetic peptide
  MOD_RES (4)..(4): phosphorylated serine
KRMSPKPYFFRKNLLRLTG

SEQ ID NO: 3848 - protein, 20 aa, Artificial Sequence
  Description of Artificial Sequence: Synthetic peptide
  MOD_RES (5)..(5): phosphorylated serine
KRPESPPSIFFRKNLLRLTG

SEQ ID NO: 3849 - protein, 20 aa, Artificial Sequence
  Description of Artificial Sequence: Synthetic peptide
  MOD_RES (5)..(5): phosphorylated serine
KRWQSPVTKFFRKNLLRLTG

SEQ ID NO: 3850 - protein, 20 aa, Artificial Sequence
  Description of Artificial Sequence: Synthetic peptide
  MOD_RES (4)..(4): phosphorylated serine
KRYSEPVSLFFRKNLLRLTG

SEQ ID NO: 3851 - protein, 20 aa, Artificial Sequence
  Description of Artificial Sequence: Synthetic peptide
  MOD_RES (4)..(4): phosphorylated serine
KRYSGNMEFFFRKNLLRLTG

SEQ ID NO: 3852 - protein, 20 aa, Artificial Sequence
  Description of Artificial Sequence: Synthetic peptide
  MOD_RES (4)..(4): phosphorylated serine
KRYSGNMEKFFRKNLLRLTG

SEQ ID NO: 3853 - protein, 20 aa, Artificial Sequence
  Description of Artificial Sequence: Synthetic peptide
  MOD_RES (4)..(4): phosphorylated serine
KRYSGNMELFFRKNLLRLTG

SEQ ID NO: 3854 - protein, 20 aa, Artificial Sequence
  Description of Artificial Sequence: Synthetic peptide
  MOD_RES (4)..(4): phosphorylated serine
KRYSGNMEMFFRKNLLRLTG

SEQ ID NO: 3855 - protein, 20 aa, Artificial Sequence
  Description of Artificial Sequence: Synthetic peptide
  MOD_RES (4)..(4): phosphorylated serine
KRYSGNMERFFRKNLLRLTG

SEQ ID NO: 3856 - protein, 20 aa, Artificial Sequence
  Description of Artificial Sequence: Synthetic peptide
  MOD_RES (4)..(4): phosphorylated serine
  MOD_RES (7)..(7): oxidized methionine
KRYSGNMEYFFRKNLLRLTG

SEQ ID NO: 3857 - protein, 20 aa, Artificial Sequence
  Description of Artificial Sequence: Synthetic peptide
  MOD_RES (4)..(4): phosphorylated serine
KRYSGNMEYFFRKNLLRLTG

SEQ ID NO: 3858 - protein, 20 aa, Artificial Sequence
  Description of Artificial Sequence: Synthetic peptide
  MOD_RES (4)..(4): phosphorylated serine
KRYSRALYLFFRKNLLRLTG

SEQ ID NO: 3859 - protein, 20 aa, Artificial Sequence
  Description of Artificial Sequence: Synthetic peptide
  MOD_RES (4)..(4): phosphorylated serine
KSDSRQERYFFRKNLLRLTG

SEQ ID NO: 3860 - protein, 20 aa, Artificial Sequence
  Description of Artificial Sequence: Synthetic peptide
  MOD_RES (4)..(4): phosphorylated serine
KSESRQERYFFRKNLLRLTG

SEQ ID NO: 3861 - protein, 20 aa, Artificial Sequence
  Description of Artificial Sequence: Synthetic peptide
  MOD_RES (8)..(8): phosphorylated threonine
KSGELLATWFFRKNLLRLTG

SEQ ID NO: 3862 - protein, 22 aa, Artificial Sequence
  Description of Artificial Sequence: Synthetic peptide
  MOD_RES (4)..(4): phosphorylated serine
KSKSNPDFLKKFFRKNLLRLTG

SEQ ID NO: 3863 - protein, 21 aa, Artificial Sequence
  Description of Artificial Sequence: Synthetic peptide
  MOD_RES (4)..(4): phosphorylated serine
KSKSNPFLKKFFRKNLLRLTG

SEQ ID NO: 3864 - protein, 20 aa, Artificial Sequence
  Description of Artificial Sequence: Synthetic peptide
  MOD_RES (4)..(4): phosphorylated threonine
KSKTPLVAKFFRKNLLRLTG

SEQ ID NO: 3865 - protein, 20 aa, Artificial Sequence
  Description of Artificial Sequence: Synthetic peptide
  MOD_RES (4)..(4): phosphorylated threonine
KSKTPLVARFFRKNLLRLTG

SEQ ID NO: 3866 - protein, 20 aa, Artificial Sequence
  Description of Artificial Sequence: Synthetic peptide
  MOD_RES (4)..(4): phosphorylated threonine
KSKTPLVAYFFRKNLLRLTG

SEQ ID NO: 3867 - protein, 20 aa, Artificial Sequence
  Description of Artificial Sequence: Synthetic peptide
  MOD_RES (2)..(2): phosphorylated serine
KSLVRLLLLFFRKNLLRLTG

SEQ ID NO: 3868 - protein, 21 aa, Artificial Sequence
  Description of Artificial Sequence: Synthetic peptide
  MOD_RES (4)..(4): phosphorylated serine
KSSSLGNLKKFFRKNLLRLTG

SEQ ID NO: 3869 - protein, 25 aa, Artificial Sequence
  Description of Artificial Sequence: Synthetic peptide
  MOD_RES (2)..(2): phosphorylated serine
KSVKALSSLHGDDQFFRKNLLRLTG

SEQ ID NO: 3870 - protein, 26 aa, Artificial Sequence
  Description of Artificial Sequence: Synthetic peptide
  MOD_RES (2)..(2): phosphorylated serine
KSVKALSSLHGDDQDFFRKNLLRLTG

SEQ ID NO: 3871 - protein, 30 aa, Artificial Sequence
  Description of Artificial Sequence: Synthetic polypeptide
  MOD_RES (2)..(2): phosphorylated serine
  MOD_RES (16)..(16): phosphorylated serine
KSVKALSSLHGDDQDSEDEFFRKNLLRLTG

SEQ ID NO: 3872 - protein, 30 aa, Artificial Sequence; identical to SEQ ID NO: 3871
  Description of Artificial Sequence: Synthetic polypeptide
  MOD_RES (16)..(16): phosphorylated serine

SEQ ID NO: 3873 - protein, 20 aa, Artificial Sequence
  Description of Artificial Sequence: Synthetic peptide
  MOD_RES (4)..(4): phosphorylated serine
KTDSRQERYFFRKNLLRLTG

SEQ ID NO: 3874 - protein, 20 aa, Artificial Sequence
  Description of Artificial Sequence: Synthetic peptide
  MOD_RES (4)..(4): phosphorylated serine
KTESRQERYFFRKNLLRLTG

SEQ ID NO: 3875 - protein, 23 aa, Artificial Sequence
  Description of Artificial Sequence: Synthetic peptide
  MOD_RES (2)..(2): phosphorylated threonine
KTLSPGKNGVVKFFRKNLLRLTG

SEQ ID NO: 3876 - protein, 23 aa, Artificial Sequence
  Description of Artificial Sequence: Synthetic peptide
  MOD_RES (2)..(2): phosphorylated threonine
KTLSPGKNGVVYFFRKNLLRLTG

SEQ ID NO: 3877 - protein, 20 aa, Artificial Sequence
  Description of Artificial Sequence: Synthetic peptide
  MOD_RES (4)..(4): phosphorylated serine
KTMSGTFLLFFRKNLLRLTG

SEQ ID NO: 3878 - protein, 21 aa, Artificial Sequence
  Description of Artificial Sequence: Synthetic peptide
  MOD_RES (4)..(4): phosphorylated serine
KTMSPSQMIMFFRKNLLRLTG

SEQ ID NO: 3879 - protein, 21 aa, Artificial Sequence
  Description of Artificial Sequence: Synthetic peptide
  MOD_RES (5)..(5): phosphorylated serine
KTPTSPLKMKFFRKNLLRLTG

SEQ ID NO: 3880 - protein, 21 aa, Artificial Sequence
  Description of Artificial Sequence: Synthetic peptide
  MOD_RES (5)..(5): phosphorylated serine
KTPTSPLKMYFFRKNLLRLTG

SEQ ID NO: 3881 - protein, 20 aa, Artificial Sequence
  Description of Artificial Sequence: Synthetic peptide
  MOD_RES (6)..(6): phosphorylated serine
KTWKGSIGLFFRKNLLRLTG

SEQ ID NO: 3882 - protein, 20 aa, Artificial Sequence
  Description of Artificial Sequence: Synthetic peptide
  MOD_RES (4)..(4): phosphorylated serine
KVASLLHQVFFRKNLLRLTG

SEQ ID NO: 3883 - protein, 19 aa, Artificial Sequence
  Description of Artificial Sequence: Synthetic peptide
  MOD_RES (4)..(4): phosphorylated serine
KVDSPVIFFFRKNLLRLTG

SEQ ID NO: 3884 - protein, 22 aa, Artificial Sequence
  Description of Artificial Sequence: Synthetic peptide
  MOD_RES (5)..(5): phosphorylated serine
KVHGSLARAGKFFRKNLLRLTG

SEQ ID NO: 3885 - protein, 22 aa, Artificial Sequence
  Description of Artificial Sequence: Synthetic peptide
  MOD_RES (5)..(5): phosphorylated serine
KVHGSLARAGYFFRKNLLRLTG

SEQ ID NO: 3886 - protein, 22 aa, Artificial Sequence
  Description of Artificial Sequence: Synthetic peptide
  MOD_RES (5)..(5): phosphorylated serine
KVKSSPLIEKKFFRKNLLRLTG

SEQ ID NO: 3887 - protein, 22 aa, Artificial Sequence
  Description of Artificial Sequence: Synthetic peptide
  MOD_RES (4)..(4): phosphorylated serine
KVKSSPLIEKLFFRKNLLRLTG

SEQ ID NO: 3888 - protein, 22 aa, Artificial Sequence
  Description of Artificial Sequence: Synthetic peptide
  MOD_RES (5)..(5): phosphorylated serine
KVKSSPLIEKLFFRKNLLRLTG

SEQ ID NO: 3889 - protein, 22 aa, Artificial Sequence
  Description of Artificial Sequence: Synthetic peptide
  MOD_RES (5)..(5): phosphorylated serine
KVKSSPLIEKYFFRKNLLRLTG

SEQ ID NO: 3890 - protein, 20 aa, Artificial Sequence
  Description of Artificial Sequence: Synthetic peptide
  MOD_RES (4)..(4): phosphorylated serine
KVLSKEFHLFFRKNLLRLTG

SEQ ID NO: 3891 - protein, 20 aa, Artificial Sequence
  Description of Artificial Sequence: Synthetic peptide
  MOD_RES (6)..(6): phosphorylated threonine
KVLSPTAAKFFRKNLLRLTG

SEQ ID NO: 3892 - protein, 20 aa, Artificial Sequence
  Description of Artificial Sequence: Synthetic peptide
  MOD_RES (4)..(4): phosphorylated serine
KVLSSLVTLFFRKNLLRLTG

SEQ ID NO: 3893 - protein, 21 aa, Artificial Sequence
  Description of Artificial Sequence: Synthetic peptide
  MOD_RES (4)..(4): phosphorylated serine
KVLSTEEMELFFRKNLLRLTG

SEQ ID NO: 3894 - protein, 21 aa, Artificial Sequence
  Description of Artificial Sequence: Synthetic peptide
  MOD_RES (5)..(5): phosphorylated threonine
KVLSTEEMELFFRKNLLRLTG

SEQ ID NO: 3895 - protein, 20 aa, Artificial Sequence
  Description of Artificial Sequence: Synthetic peptide
  MOD_RES (4)..(4): phosphorylated threonine
KVLTPIKEKFFRKNLLRLTG

SEQ ID NO: 3896 - protein, 20 aa, Artificial Sequence
  Description of Artificial Sequence: Synthetic peptide
  MOD_RES (4)..(4): phosphorylated threonine
KVLTPIKEKFFRKNLLRLTG

SEQ ID NO: 3897 - protein, 20 aa, Artificial Sequence
  Description of Artificial Sequence: Synthetic peptide
  MOD_RES (4)..(4): phosphorylated threonine
KVLTPIKEYFFRKNLLRLTG

SEQ ID NO: 3898 - protein, 21 aa, Artificial Sequence
  Description of Artificial Sequence: Synthetic peptide
  MOD_RES (5)..(5): phosphorylated serine
KVPDSPALAKFFRKNLLRLTG

SEQ ID NO: 3899 - protein, 22 aa, Artificial Sequence
  Description of Artificial Sequence: Synthetic peptide
  MOD_RES (5)..(5): phosphorylated serine
KVPDSPALAKKFFRKNLLRLTG

SEQ ID NO: 3900 - protein, 22 aa, Artificial Sequence
  Description of Artificial Sequence: Synthetic peptide
  MOD_RES (5)..(5): phosphorylated serine
KVPDSPALAKYFFRKNLLRLTG

SEQ ID NO: 3901 - protein, 21 aa, Artificial Sequence
  Description of Artificial Sequence: Synthetic peptide
  MOD_RES (5)..(5): phosphorylated serine
KVPDSPALAYFFRKNLLRLTG

SEQ ID NO: 3902 - protein, 21 aa, Artificial Sequence
  Description of Artificial Sequence: Synthetic peptide
  MOD_RES (5)..(5): phosphorylated serine
KVPTSPLKMYFFRKNLLRLTG

SEQ ID NO: 3903 - protein, 20 aa, Artificial Sequence
  Description of Artificial Sequence: Synthetic peptide
  MOD_RES (4)..(4): phosphorylated serine
KVQSLRRALFFRKNLLRLTG

SEQ ID NO: 3904 - protein, 20 aa, Artificial Sequence
  Description of Artificial Sequence: Synthetic peptide
  MOD_RES (5)..(5): phosphorylated threonine
KVQVTSLSVFFRKNLLRLTG

SEQ ID NO: 3905 - protein, 20 aa, Artificial Sequence
  Description of Artificial Sequence: Synthetic peptide
  MOD_RES (4)..(4): phosphorylated serine
KVYSSSEFLFFRKNLLRLTG

SEQ ID NO: 3906 - protein, 20 aa, Artificial Sequence
  Description of Artificial Sequence: Synthetic peptide
  MOD_RES (4)..(4): phosphorylated serine
KYISGPHELFFRKNLLRLTG

SEQ ID NO: 3907 - protein, 21 aa, Artificial Sequence
  Description of Artificial Sequence: Synthetic peptide
  MOD_RES (3)..(3): phosphorylated serine
KYSPGKLRGNFFRKNLLRLTG

SEQ ID NO: 3908 - protein, 36 aa, Artificial Sequence
  Description of Artificial Sequence: Synthetic polypeptide
  MOD_RES (18)..(18): phosphorylated serine
LGGGGAGLSGRASGGAQSPLRYLHVFFRKNLLRLTG

SEQ ID NO: 3909 - protein, 20 aa, Artificial Sequence
  Description of Artificial Sequence: Synthetic peptide
  MOD_RES (4)..(4): phosphorylated serine
LKLSYLTWVFFRKNLLRLTG

SEQ ID NO: 3910 - protein, 21 aa, Artificial Sequence
  Description of Artificial Sequence: Synthetic peptide
  MOD_RES (4)..(4): phosphorylated serine
LLASPGHISVFFRKNLLRLTG

SEQ ID NO: 3911 - protein, 21 aa, Artificial Sequence
  Description of Artificial Sequence: Synthetic peptide
  MOD_RES (9)..(9): phosphorylated serine
LLDPSRSYSYFFRKNLLRLTG

SEQ ID NO: 3912 - protein, 21 aa, Artificial Sequence
  Description of Artificial Sequence: Synthetic peptide
  MOD_RES (4)..(4): phosphorylated threonine
LLDTPVKTQYFFRKNLLRLTG

SEQ ID NO: 3913 - protein, 20 aa, Artificial Sequence
  Description of Artificial Sequence: Synthetic peptide
  MOD_RES (4)..(4): phosphorylated serine
LLFSPVTSLFFRKNLLRLTG

SEQ ID NO: 3914 - protein, 20 aa, Artificial Sequence
  Description of Artificial Sequence: Synthetic peptide
  MOD_RES (4)..(4): phosphorylated serine
LLFSPVTSVFFRKNLLRLTG

SEQ ID NO: 3915 - protein, 20 aa, Artificial Sequence
  Description of Artificial Sequence: Synthetic peptide
  MOD_RES (4)..(4): phosphorylated serine
LLLSEEVELFFRKNLLRLTG

SEQ ID NO: 3916 - protein, 20 aa, Artificial Sequence
  Description of Artificial Sequence: Synthetic peptide
  MOD_RES (6)..(6): phosphorylated serine
LLNKSSPVKFFRKNLLRLTG

SEQ ID NO: 3917 - protein, 21 aa, Artificial Sequence
  Description of Artificial Sequence: Synthetic peptide
  MOD_RES (6)..(6): phosphorylated serine
LLNKSSPVKKFFRKNLLRLTG

SEQ ID NO: 3918 - protein, 21 aa, Artificial Sequence
  Description of Artificial Sequence: Synthetic peptide
  MOD_RES (6)..(6): phosphorylated serine
LLNKSSPVKYFFRKNLLRLTG

SEQ ID NO: 3919 - protein, 20 aa, Artificial Sequence
  Description of Artificial Sequence: Synthetic peptide
  MOD_RES (4)..(4): phosphorylated serine
LMFSPVTSLFFRKNLLRLTG

SEQ ID NO: 3920 - protein, 20 aa, Artificial Sequence
  Description of Artificial Sequence: Synthetic peptide
  MOD_RES (4)..(4): phosphorylated serine
LMFSPVTSVFFRKNLLRLTG

SEQ ID NO: 3921 - protein, 19 aa, Artificial Sequence
  Description of Artificial Sequence: Synthetic peptide
  MOD_RES (4)..(4): phosphorylated serine
LMFSVTSIFFRKNLLRLTG

SEQ ID NO: 3922 - protein, 19 aa, Artificial Sequence
  Description of Artificial Sequence: Synthetic peptide
  MOD_RES (4)..(4): phosphorylated serine
LMFSVTSLFFRKNLLRLTG

SEQ ID NO: 3923 - protein, 20 aa, Artificial Sequence
  Description of Artificial Sequence: Synthetic peptide
  MOD_RES (6)..(6): phosphorylated serine
LMNKSSPVKFFRKNLLRLTG

SEQ ID NO: 3924 - protein, 21 aa, Artificial Sequence
  Description of Artificial Sequence: Synthetic peptide
  MOD_RES (6)..(6): phosphorylated serine
LMNKSSPVKKFFRKNLLRLTG

SEQ ID NO: 3925 - protein, 21 aa, Artificial Sequence
  Description of Artificial Sequence: Synthetic peptide
  MOD_RES (6)..(6): phosphorylated serine
LMNKSSPVKYFFRKNLLRLTG

SEQ ID NO: 3926 - protein, 19 aa, Artificial Sequence
  Description of Artificial Sequence: Synthetic peptide
  MOD_RES (4)..(4): phosphorylated serine
LPASPHQFFFRKNLLRLTG

SEQ ID NO: 3927 - protein, 19 aa, Artificial Sequence
  Description of Artificial Sequence: Synthetic peptide
  MOD_RES (4)..(4): phosphorylated serine
LPASPHQLFFRKNLLRLTG

SEQ ID NO: 3928 - protein, 19 aa, Artificial Sequence
  Description of Artificial Sequence: Synthetic peptide
  MOD_RES (4)..(4): phosphorylated serine
LPASPHQMFFRKNLLRLTG

SEQ ID NO: 3929 - protein, 19 aa, Artificial Sequence
  Description of Artificial Sequence: Synthetic peptide
  MOD_RES (4)..(4): phosphorylated serine
LPASPHQVFFRKNLLRLTG

SEQ ID NO: 3930 - protein, 20 aa, Artificial Sequence
  Description of Artificial Sequence: Synthetic peptide
  MOD_RES (4)..(4): phosphorylated serine
LPASPRARFFFRKNLLRLTG

SEQ ID NO: 3931 - protein, 20 aa, Artificial Sequence
  Description of Artificial Sequence: Synthetic peptide
  MOD_RES (4)..(4): phosphorylated serine
LPASPRARLFFRKNLLRLTG

SEQ ID NO: 3932 - protein, 20 aa, Artificial Sequence
  Description of Artificial Sequence: Synthetic peptide
  MOD_RES (4)..(4): phosphorylated serine
LPASPRARMFFRKNLLRLTG

SEQ ID NO: 3933 - protein, 20 aa, Artificial Sequence
  Description of Artificial Sequence: Synthetic peptide
  MOD_RES (4)..(4): phosphorylated serine
LPASPRARVFFRKNLLRLTG

SEQ ID NO: 3934 - protein, 20 aa, Artificial Sequence
  Description of Artificial Sequence: Synthetic peptide
  MOD_RES (8)..(8): phosphorylated serine
LPIFSRLSFFFRKNLLRLTG

SEQ ID NO: 3935 - protein, 20 aa, Artificial Sequence
  Description of Artificial Sequence: Synthetic peptide
  MOD_RES (8)..(8): phosphorylated serine
LPIFSRLSIFFRKNLLRLTG

SEQ ID NO: 3936 - protein, 20 aa, Artificial Sequence
  Description of Artificial Sequence: Synthetic peptide
  MOD_RES (8)..(8): phosphorylated serine
LPIFSRLSLFFRKNLLRLTG

SEQ ID NO: 3937 - protein, 20 aa, Artificial Sequence
  Description of Artificial Sequence: Synthetic peptide
  MOD_RES (8)..(8): phosphorylated serine
LPIFSRLSMFFRKNLLRLTG

SEQ ID NO: 3938 - protein, 20 aa, Artificial Sequence
  Description of Artificial Sequence: Synthetic peptide
  MOD_RES (8)..(8): phosphorylated serine
LPIFSRLSVFFRKNLLRLTG

SEQ ID NO: 3939 - protein, 20 aa, Artificial Sequence
  Description of Artificial Sequence: Synthetic peptide
  MOD_RES (6)..(6): phosphorylated serine
LPKGLSASLFFRKNLLRLTG

SEQ ID NO: 3940 - protein, 20 aa, Artificial Sequence
  Description of Artificial Sequence: Synthetic peptide
  MOD_RES (8)..(8): phosphorylated serine
LPKGLSASLFFRKNLLRLTG

SEQ ID NO: 3941 - protein, 21 aa, Artificial Sequence
  Description of Artificial Sequence: Synthetic peptide
  MOD_RES (4)..(4): phosphorylated serine
LPKSPPYTAFFFRKNLLRLTG

SEQ ID NO: 3942 - protein, 21 aa, Artificial Sequence
  Description of Artificial Sequence: Synthetic peptide
  MOD_RES (4)..(4): phosphorylated serine
LPKSPPYTALFFRKNLLRLTG

SEQ ID NO: 3943 - protein, 21 aa, Artificial Sequence
  Description of Artificial Sequence: Synthetic peptide
  MOD_RES (4)..(4): phosphorylated serine
LPKSPPYTAMFFRKNLLRLTG

SEQ ID NO: 3944 - protein, 21 aa, Artificial Sequence
  Description of Artificial Sequence: Synthetic peptide
  MOD_RES (4)..(4): phosphorylated serine
LPKSPPYTAVFFRKNLLRLTG

SEQ ID NO: 3945 - protein, 21 aa, Artificial Sequence
  Description of Artificial Sequence: Synthetic peptide
  MOD_RES (6)..(6): phosphorylated serine
LPRGSSPSVFFFRKNLLRLTG

SEQ ID NO: 3946 - protein, 21 aa, Artificial Sequence
  Description of Artificial Sequence: Synthetic peptide
  MOD_RES (5)..(5): phosphorylated serine
LPRGSSPSVLFFRKNLLRLTG

SEQ ID NO: 3947 - protein, 21 aa, Artificial Sequence
  Description of Artificial Sequence: Synthetic peptide
  MOD_RES (6)..(6): phosphorylated serine
LPRGSSPSVLFFRKNLLRLTG

SEQ ID NO: 3948 - protein, 21 aa, Artificial Sequence
  Description of Artificial Sequence: Synthetic peptide
  MOD_RES (6)..(6): phosphorylated serine
LPRGSSPSVMFFRKNLLRLTG

SEQ ID NO: 3949 - protein, 21 aa, Artificial Sequence
  Description of Artificial Sequence: Synthetic peptide
  MOD_RES (6)..(6): phosphorylated serine
LPRGSSPSVVFFRKNLLRLTG

SEQ ID NO: 3950 - protein, 21 aa, Artificial Sequence
  Description of Artificial Sequence: Synthetic peptide
  MOD_RES (4)..(4): oxidized methionine
  MOD_RES (6)..(6): phosphorylated serine
LPRMISHSELFFRKNLLRLTG

SEQ ID NO: 3951 - protein, 21 aa, Artificial Sequence
  Description of Artificial Sequence: Synthetic peptide
  MOD_RES (6)..(6): phosphorylated serine
LPRMISHSELFFRKNLLRLTG

SEQ ID NO: 3952 - protein, 20 aa, Artificial Sequence
  Description of Artificial Sequence: Synthetic peptide
  MOD_RES (6)..(6): phosphorylated serine
LPRPASPALFFRKNLLRLTG

SEQ ID NO: 3953 - protein, 20 aa, Artificial Sequence
  Description of Artificial Sequence: Synthetic peptide
  MOD_RES (6)..(6): phosphorylated serine
LPRSSSMAAFFRKNLLRLTG

SEQ ID NO: 3954 - protein, 22 aa, Artificial Sequence
  Description of Artificial Sequence: Synthetic peptide
  MOD_RES (6)..(6): phosphorylated serine
LPRSSSMAAGLFFRKNLLRLTG

SEQ ID NO: 3955 - protein, 20 aa, Artificial Sequence
  Description of Artificial Sequence: Synthetic peptide
  MOD_RES (4)..(4): phosphorylated threonine
LPRTPRPELFFRKNLLRLTG

SEQ ID NO: 3956 - protein, 20 aa, Artificial Sequence
  Description of Artificial Sequence: Synthetic peptide
  MOD_RES (4)..(4): phosphorylated serine
LPVSPRLQLFFRKNLLRLTG

SEQ ID NO: 3957 - protein, 22 aa, Artificial Sequence
  Description of Artificial Sequence: Synthetic peptide
  MOD_RES (4)..(4): phosphorylated serine
LQLSPLKGLSLFFRKNLLRLTG

SEQ ID NO: 3958 - protein, 20 aa, Artificial Sequence
  Description of Artificial Sequence: Synthetic peptide
  MOD_RES (5)..(5): phosphorylated threonine
LQNITENQLFFRKNLLRLTG

SEQ ID NO: 3959 - protein, 21 aa, Artificial Sequence
  Description of Artificial Sequence: Synthetic peptide
  MOD_RES (9)..(9): phosphorylated serine
LSDPSRSYSYFFRKNLLRLTG

SEQ ID NO: 3960 - protein, 21 aa, Artificial Sequence
  Description of Artificial Sequence: Synthetic peptide
  MOD_RES (4)..(4): phosphorylated serine
LSDSDTEAKLFFRKNLLRLTG

SEQ ID NO: 3961 - protein, 21 aa, Artificial Sequence
  Description of Artificial Sequence: Synthetic peptide
  MOD_RES (4)..(4): phosphorylated serine
LSDSDTEAKYFFRKNLLRLTG

SEQ ID NO: 3962 - protein, 21 aa, Artificial Sequence
  Description of Artificial Sequence: Synthetic peptide
  MOD_RES (4)..(4): phosphorylated threonine
LSDTPVKTQYFFRKNLLRLTG

SEQ ID NO: 3963 - protein, 21 aa, Artificial Sequence
  Description of Artificial Sequence: Synthetic peptide
  MOD_RES (9)..(9): phosphorylated serine
LSEPSRSYSYFFRKNLLRLTG

SEQ ID NO: 3964 - protein, 21 aa, Artificial Sequence
  Description of Artificial Sequence: Synthetic peptide
  MOD_RES (4)..(4): phosphorylated serine
LSESDTEAKLFFRKNLLRLTG

SEQ ID NO: 3965 - protein, 21 aa, Artificial Sequence
  Description of Artificial Sequence: Synthetic peptide
  MOD_RES (4)..(4): phosphorylated serine
LSESDTEAKYFFRKNLLRLTG

SEQ ID NO: 3966 - protein, 21 aa, Artificial Sequence
  Description of Artificial Sequence: Synthetic peptide
  MOD_RES (4)..(4): phosphorylated threonine
LSETPVKTQYFFRKNLLRLTG

SEQ ID NO: 3967 - protein, 29 aa, Artificial Sequence
  Description of Artificial Sequence: Synthetic peptide
  MOD_RES (15)..(15): phosphorylated serine
LSKFRMPQPSSGRESPRHFFRKNLLRLTG

SEQ ID NO: 3968 - protein, 20 aa, Artificial Sequence
  Description of Artificial Sequence: Synthetic peptide
  MOD_RES (4)..(4): phosphorylated serine
LSSSVIRELFFRKNLLRLTG

SEQ ID NO: 3969 - protein, 21 aa, Artificial Sequence
  Description of Artificial Sequence: Synthetic peptide
  MOD_RES (9)..(9): phosphorylated serine
LTDPSRSYSYFFRKNLLRLTG

SEQ ID NO: 3970 - protein, 23 aa, Artificial Sequence
  Description of Artificial Sequence: Synthetic peptide
  MOD_RES (6)..(6): phosphorylated serine
LTDPSSPTISSYFFRKNLLRLTG

SEQ ID NO: 3971 - protein, 21 aa, Artificial Sequence
  Description of Artificial Sequence: Synthetic peptide
  MOD_RES (4)..(4): phosphorylated serine
LTDSDTEAKLFFRKNLLRLTG

SEQ ID NO: 3972 - protein, 21 aa, Artificial Sequence
  Description of Artificial Sequence: Synthetic peptide
  MOD_RES (4)..(4): phosphorylated serine
LTDSDTEAKYFFRKNLLRLTG

SEQ ID NO: 3973 - protein, 21 aa, Artificial Sequence
  Description of Artificial Sequence: Synthetic peptide
  MOD_RES (4)..(4): phosphorylated threonine
LTDTPVKTQYFFRKNLLRLTG

SEQ ID NO: 3974 - protein, 21 aa, Artificial Sequence
  Description of Artificial Sequence: Synthetic peptide
  MOD_RES (9)..(9): phosphorylated serine
LTEPSRSYSYFFRKNLLRLTG

SEQ ID NO: 3975 - protein, 21 aa, Artificial Sequence
  Description of Artificial Sequence: Synthetic peptide
  MOD_RES (4)..(4): phosphorylated serine
LTESDTEAKLFFRKNLLRLTG

SEQ ID NO: 3976 - protein, 21 aa, Artificial Sequence
  Description of Artificial Sequence: Synthetic peptide
  MOD_RES (4)..(4): phosphorylated serine
LTESDTEAKYFFRKNLLRLTG

SEQ ID NO: 3977 - protein, 21 aa, Artificial Sequence
  Description of Artificial Sequence: Synthetic peptide
  MOD_RES (4)..(4): phosphorylated threonine
LTETPVKTQYFFRKNLLRLTG

SEQ ID NO: 3978 - protein, 21 aa, Artificial Sequence
  Description of Artificial Sequence: Synthetic peptide
  MOD_RES (4)..(4): phosphorylated threonine
LTETPVKTQYFFRKNLLRLTG

SEQ ID NO: 3979 - protein, 22 aa, Artificial Sequence
  Description of Artificial Sequence: Synthetic peptide
  MOD_RES (5)..(5): phosphorylated serine
MLAESPSVPRLFFRKNLLRLTG

SEQ ID NO: 3980 - protein, 22 aa, Artificial Sequence
  Description of Artificial Sequence: Synthetic peptide
  MOD_RES (5)..(5): phosphorylated serine
MLAESPSVPRVFFRKNLLRLTG

SEQ ID NO: 3981 - protein, 21 aa, Artificial Sequence
  Description of Artificial Sequence: Synthetic peptide
  MOD_RES (4)..(4): phosphorylated serine
MLRSPPRVSKFFRKNLLRLTG

SEQ ID NO: 3982 - protein, 21 aa, Artificial Sequence
  Description of Artificial Sequence: Synthetic peptide
  MOD_RES (4)..(4): phosphorylated serine
MMRSPPRVSKFFRKNLLRLTG

SEQ ID NO: 3983 - protein, 28 aa, Artificial Sequence
  Description of Artificial Sequence: Synthetic peptide
  MOD_RES (5)..(5): phosphorylated serine
MPRPSIKKAQNSQAARQFFRKNLLRLTG

SEQ ID NO: 3984 - protein, 21 aa, Artificial Sequence
  Description of Artificial Sequence: Synthetic peptide
  MOD_RES (6)..(6): phosphorylated serine
MPRQPSAIRMFFRKNLLRLTG

SEQ ID NO: 3985 - protein, 21 aa, Artificial Sequence
  Description of Artificial Sequence: Synthetic peptide
  MOD_RES (6)..(6): phosphorylated serine
MPRQPSATRFFFRKNLLRLTG

SEQ ID NO: 3986 - protein, 21 aa, Artificial Sequence
  Description of Artificial Sequence: Synthetic peptide
  MOD_RES (6)..(6): phosphorylated serine
MPRQPSATRLFFRKNLLRLTG

SEQ ID NO: 3987 - protein, 21 aa, Artificial Sequence
  Description of Artificial Sequence: Synthetic peptide
  MOD_RES (6)..(6): phosphorylated serine
MPRQPSATRMFFRKNLLRLTG

SEQ ID NO: 3988 - protein, 21 aa, Artificial Sequence
  Description of Artificial Sequence: Synthetic peptide
  MOD_RES (6)..(6): phosphorylated serine
MPRQPSATRVFFRKNLLRLTG

SEQ ID NO: 3989 - protein, 20 aa, Artificial Sequence
  Description of Artificial Sequence: Synthetic peptide
  MOD_RES (4)..(4): phosphorylated serine
MRLSEWLQLFFRKNLLRLTG

SEQ ID NO: 3990 - protein, 20 aa, Artificial Sequence
  Description of Artificial Sequence: Synthetic peptide
  MOD_RES (4)..(4): phosphorylated serine
MRLSRELQFFFRKNLLRLTG

SEQ ID NO: 3991 - protein, 20 aa, Artificial Sequence
  Description of Artificial Sequence: Synthetic peptide
  MOD_RES (4)..(4): phosphorylated serine
MRLSRELQKFFRKNLLRLTG

SEQ ID NO: 3992 - protein, 20 aa, Artificial Sequence
  Description of Artificial Sequence: Synthetic peptide
  MOD_RES (4)..(4): phosphorylated serine
MRLSRELQLFFRKNLLRLTG

SEQ ID NO: 3993 - protein, 20 aa, Artificial Sequence
  Description of Artificial Sequence: Synthetic peptide
  MOD_RES (4)..(4): phosphorylated serine
MRLSRELQMFFRKNLLRLTG

SEQ ID NO: 3994 - protein, 20 aa, Artificial Sequence
  Description of Artificial Sequence: Synthetic peptide
  MOD_RES (4)..(4): phosphorylated serine
MRLSRELQRFFRKNLLRLTG

SEQ ID NO: 3995 - protein, 20 aa, Artificial Sequence
  Description of Artificial Sequence: Synthetic peptide
  MOD_RES (4)..(4): phosphorylated serine
MRLSRELQYFFRKNLLRLTG

SEQ ID NO: 3996 - protein, 20 aa, Artificial Sequence
  Description of Artificial Sequence: Synthetic peptide
  MOD_RES (4)..(4): phosphorylated threonine
MSDTYRLKYFFRKNLLRLTG

SEQ ID NO: 3997 - protein, 20 aa, Artificial Sequence
  Description of Artificial Sequence: Synthetic peptide
  MOD_RES (4)..(4): phosphorylated threonine
MSETYRLKYFFRKNLLRLTG

SEQ ID NO: 3998 - protein, 20 aa, Artificial Sequence
  Description of Artificial Sequence: Synthetic peptide
  MOD_RES (4)..(4): phosphorylated threonine
MTDTYRLKYFFRKNLLRLTG

SEQ ID NO: 3999 - protein, 20 aa, Artificial Sequence
  Description of Artificial Sequence: Synthetic peptide
  MOD_RES (4)..(4): phosphorylated threonine
MTETYRLKYFFRKNLLRLTG

SEQ ID NO: 4000 - protein, 21 aa, Artificial Sequence
  Description of Artificial Sequence: Synthetic peptide
  MOD_RES (4)..(4): phosphorylated serine
MTRSPPRVSKFFRKNLLRLTG

SEQ ID NO: 4001 - protein, 21 aa, Artificial Sequence
  Description of Artificial Sequence: Synthetic peptide
  MOD_RES (4)..(4): phosphorylated serine
MTRSPPRVSYFFRKNLLRLTG

SEQ ID NO: 4002 - protein, 23 aa, Artificial Sequence
  Description of Artificial Sequence: Synthetic peptide
  MOD_RES (10)..(10): phosphorylated serine
NAPPAYEKLSAEFFRKNLLRLTG

SEQ ID NO: 4003 - protein, 21 aa, Artificial Sequence
  Description of Artificial Sequence: Synthetic peptide
  MOD_RES (4)..(4): phosphorylated serine
NFKSPVKTIRFFRKNLLRLTG

SEQ ID NO: 4004 - protein, 32 aa, Artificial Sequence
  Description of Artificial Sequence: Synthetic polypeptide
  MOD_RES (18)..(18): phosphorylated serine
NLELSKFRMPQPSSGRESPRHFFRKNLLRLTG

SEQ ID NO: 4005 - protein, 22 aa, Artificial Sequence
  Description of Artificial Sequence: Synthetic peptide
  MOD_RES (4)..(4): phosphorylated serine
NLGSRNHVHQLFFRKNLLRLTG

SEQ ID NO: 4006 - protein, 23 aa, Artificial Sequence
  Description of Artificial Sequence: Synthetic peptide
  MOD_RES (4)..(4): phosphorylated serine
NLLSPDGKMISVFFRKNLLRLTG

SEQ ID NO: 4007 - protein, 20 aa, Artificial Sequence
  Description of Artificial Sequence: Synthetic peptide
  MOD_RES (8)..(8): phosphorylated serine
NLVERKNSKFFRKNLLRLTG

SEQ ID NO: 4008 - protein, 20 aa, Artificial Sequence
  Description of Artificial Sequence: Synthetic peptide
  MOD_RES (8)..(8): phosphorylated serine
NLVERKNSLFFRKNLLRLTG

SEQ ID NO: 4009 - protein, 20 aa, Artificial Sequence
  Description of Artificial Sequence: Synthetic peptide
  MOD_RES (4)..(4): phosphorylated serine
NMDSPGPMLFFRKNLLRLTG

SEQ ID NO: 4010 - protein, 20 aa, Artificial Sequence
  Description of Artificial Sequence: Synthetic peptide
  MOD_RES (8)..(8): phosphorylated serine
NMVERKNSKFFRKNLLRLTG

SEQ ID NO: 4011 - protein, 20 aa, Artificial Sequence
  Description of Artificial Sequence: Synthetic peptide
  MOD_RES (8)..(8): phosphorylated serine
NMVERKNSLFFRKNLLRLTG

SEQ ID NO: 4012 - protein, 24 aa, Artificial Sequence
  Description of Artificial Sequence: Synthetic peptide
  MOD_RES (8)..(8): phosphorylated serine
NRAMRRVSSVPSRFFRKNLLRLTG

SEQ ID NO: 4013 - protein, 26 aa, Artificial Sequence
  Description of Artificial Sequence: Synthetic peptide
  MOD_RES (8)..(8): phosphorylated serine
NRAMRRVSSVPSRAQFFRKNLLRLTG

SEQ ID NO: 4014 - protein, 24 aa, Artificial Sequence
  Description of Artificial Sequence: Synthetic peptide
  MOD_RES (3)..(3): phosphorylated serine
NRSWKYNQSISLRFFRKNLLRLTG

SEQ ID NO: 4015 - protein, 26 aa, Artificial Sequence
  Description of Artificial Sequence: Synthetic peptide
  MOD_RES (3)..(3): phosphorylated serine
NRSWKYNQSISLRRPFFRKNLLRLTG

SEQ ID NO: 4016 - protein, 21 aa, Artificial Sequence
  Description of Artificial Sequence: Synthetic peptide
  MOD_RES (4)..(4): phosphorylated threonine
NRYTNRVVTFFFRKNLLRLTG

SEQ ID NO: 4017 - protein, 21 aa, Artificial Sequence
  Description of Artificial Sequence: Synthetic peptide
  MOD_RES (4)..(4): phosphorylated threonine
NRYTNRVVTKFFRKNLLRLTG

SEQ ID NO: 4018 - protein, 21 aa, Artificial Sequence
  Description of Artificial Sequence: Synthetic peptide
  MOD_RES (4)..(4): phosphorylated threonine
NRYTNRVVTLFFRKNLLRLTG

SEQ ID NO: 4019 - protein, 21 aa, Artificial Sequence
  Description of Artificial Sequence: Synthetic peptide
  MOD_RES (4)..(4): phosphorylated threonine
NRYTNRVVTMFFRKNLLRLTG

SEQ ID NO: 4020 - protein, 21 aa, Artificial Sequence
  Description of Artificial Sequence: Synthetic peptide
  MOD_RES (4)..(4): phosphorylated threonine
NRYTNRVVTRFFRKNLLRLTG

SEQ ID NO: 4021 - protein, 21 aa, Artificial Sequence
  Description of Artificial Sequence: Synthetic peptide
  MOD_RES (4)..(4): phosphorylated threonine
NRYTNRVVTYFFRKNLLRLTG

SEQ ID NO: 4022 - protein, 19 aa, Artificial Sequence
  Description of Artificial Sequence: Synthetic peptide
  MOD_RES (4)..(4): phosphorylated serine
NSDSPLRYFFRKNLLRLTG

SEQ ID NO: 4023 - protein, 19 aa, Artificial Sequence
  Description of Artificial Sequence: Synthetic peptide
  MOD_RES (4)..(4): phosphorylated serine
NSESPLRYFFRKNLLRLTG

SEQ ID NO: 4024 - protein, 19 aa, Artificial Sequence
  Description of Artificial Sequence: Synthetic peptide
  MOD_RES (4)..(4): phosphorylated serine
NTDSPLRYFFRKNLLRLTG

SEQ ID NO: 4025 - protein, 19 aa, Artificial Sequence
  Description of Artificial Sequence: Synthetic peptide
  MOD_RES (4)..(4): phosphorylated serine
NTESPLRYFFRKNLLRLTG

SEQ ID NO: 4026 - protein, 20 aa, Artificial Sequence
  Description of Artificial Sequence: Synthetic peptide
  MOD_RES (8)..(8): phosphorylated serine
NYVERKNSKFFRKNLLRLTG

SEQ ID NO: 4027 - protein, 20 aa, Artificial Sequence
  Description of Artificial Sequence: Synthetic peptide
  MOD_RES (8)..(8): phosphorylated serine
NYVERKNSLFFRKNLLRLTG

SEQ ID NO: 4028 - protein, 20 aa, Artificial Sequence
  Description of Artificial Sequence: Synthetic peptide
  MOD_RES (8)..(8): phosphorylated serine
NYVERKNSYFFRKNLLRLTG

SEQ ID NO: 4029 - protein, 20 aa, Artificial Sequence
  Description of Artificial Sequence: Synthetic peptide
  MOD_RES (4)..(4): phosphorylated serine
PARSPVTEIFFRKNLLRLTG

SEQ ID NO: 4030 - protein, 20 aa, Artificial Sequence
  Description of Artificial Sequence: Synthetic peptide
  MOD_RES (7)..(7): phosphorylated serine
PAYEKLSAEFFRKNLLRLTG

SEQ ID NO: 4031 - protein, 23 aa, Artificial Sequence
  Description of Artificial Sequence: Synthetic peptide
  MOD_RES (7)..(7): phosphorylated serine
PAYEKLSAEQSPFFRKNLLRLTG

SEQ ID NO: 4032 - protein, 20 aa, Artificial Sequence
  Description of Artificial Sequence: Synthetic peptide
  MOD_RES (2)..(2): oxidized methionine
  MOD_RES (6)..(6): phosphorylated serine
PMVTLSLNLFFRKNLLRLTG

SEQ ID NO: 4033 - protein, 20 aa, Artificial Sequence
  Description of Artificial Sequence: Synthetic peptide
  MOD_RES (6)..(6): phosphorylated serine
PMVTLSLNLFFRKNLLRLTG

SEQ ID NO: 4034 - protein, 23 aa, Artificial Sequence
  Description of Artificial Sequence: Synthetic peptide
  MOD_RES (11)..(11): phosphorylated serine
PNAPPAYEKLSAFFRKNLLRLTG

SEQ ID NO: 4035 - protein, 20 aa, Artificial Sequence
  Description of Artificial Sequence: Synthetic peptide
  MOD_RES (8)..(8): phosphorylated serine
PPAYEKLSAFFRKNLLRLTG

SEQ ID NO: 4036 - protein, 23 aa, Artificial Sequence
  Description of Artificial Sequence: Synthetic peptide
  MOD_RES (8)..(8): phosphorylated serine
PPAYEKLSAEQSFFRKNLLRLTG

SEQ ID NO: 4037 - protein, 32 aa, Artificial Sequence
  Description of Artificial Sequence: Synthetic polypeptide
  MOD_RES (18)..(18): phosphorylated serine
PPLPEDSIKVIRNMRAASPPAFFRKNLLRLTG

SEQ ID NO: 4038 - protein, 22 aa, Artificial Sequence
  Description of Artificial Sequence: Synthetic peptide
  MOD_RES (8)..(8): phosphorylated serine
PYDPALGSPSRFFRKNLLRLTG

SEQ ID NO: 4039 - protein, 25 aa, Artificial Sequence
  Description of Artificial Sequence: Synthetic peptide
  MOD_RES (8)..(8): phosphorylated serine
QAASNFKSPVKTIRFFRKNLLRLTG

SEQ ID NO: 4040 - protein, 21 aa, Artificial Sequence
  Description of Artificial Sequence: Synthetic peptide
  MOD_RES (4)..(4): phosphorylated serine
QLDSPQRALYFFRKNLLRLTG

SEQ ID NO: 4041 - protein, 21 aa, Artificial Sequence
  Description of Artificial Sequence: Synthetic peptide
  MOD_RES (4)..(4): phosphorylated serine
QLESPQRALYFFRKNLLRLTG

SEQ ID NO: 4042 - protein, 21 aa, Artificial Sequence
  Description of Artificial Sequence: Synthetic peptide
  MOD_RES (4)..(4): phosphorylated serine
QLFSPKKGQKFFRKNLLRLTG

SEQ ID NO: 4043 - protein, 21 aa, Artificial Sequence
  Description of Artificial Sequence: Synthetic peptide
  MOD_RES (4)..(4): phosphorylated serine
QMFSPKKGQKFFRKNLLRLTG

SEQ ID NO: 4044 - protein, 20 aa, Artificial Sequence
  Description of Artificial Sequence: Synthetic peptide
  MOD_RES (6)..(6): phosphorylated serine
QPQRRSLRLFFRKNLLRLTG

SEQ ID NO: 4045 - protein, 22 aa, Artificial Sequence
  Description of Artificial Sequence: Synthetic peptide
  MOD_RES (4)..(4): phosphorylated serine
QPRSPGPDYSFFFRKNLLRLTG

SEQ ID NO: 4046 - protein, 22 aa, Artificial Sequence
  Description of Artificial Sequence: Synthetic peptide
  MOD_RES (4)..(4): phosphorylated serine
QPRSPGPDYSLFFRKNLLRLTG

SEQ ID NO: 4047 - protein, 22 aa, Artificial Sequence
  Description of Artificial Sequence: Synthetic peptide
  MOD_RES (4)..(4): phosphorylated serine
QPRSPGPDYSMFFRKNLLRLTG

SEQ ID NO: 4048 - protein, 22 aa, Artificial Sequence
  Description of Artificial Sequence: Synthetic peptide
  MOD_RES (4)..(4): phosphorylated serine
QPRSPGPDYSVFFRKNLLRLTG

SEQ ID NO: 4049 - protein, 21 aa, Artificial Sequence
  Description of Artificial Sequence: Synthetic peptide
  MOD_RES (4)..(4): phosphorylated threonine
  MOD_RES (6)..(6): phosphorylated serine
QPRTPSPLVFFFRKNLLRLTG

SEQ ID NO: 4050 - protein, 21 aa, Artificial Sequence
  Description of Artificial Sequence: Synthetic peptide
  MOD_RES (4)..(4): phosphorylated threonine
QPRTPSPLVFFFRKNLLRLTG

SEQ ID NO: 4051 - protein, 21 aa, Artificial Sequence
  Description of Artificial Sequence: Synthetic peptide
  MOD_RES (4)..(4): phosphorylated threonine
  MOD_RES (6)..(6): phosphorylated serine
QPRTPSPLVLFFRKNLLRLTG

SEQ ID NO: 4052 - protein, 21 aa, Artificial Sequence
  Description of Artificial Sequence: Synthetic peptide
  MOD_RES (4)..(4): phosphorylated threonine
QPRTPSPLVLFFRKNLLRLTG

SEQ ID NO: 4053 - protein, 21 aa, Artificial Sequence
  Description of Artificial Sequence: Synthetic peptide
  MOD_RES (4)..(4): phosphorylated threonine
  MOD_RES (6)..(6): phosphorylated serine
QPRTPSPLVMFFRKNLLRLTG

SEQ ID NO: 4054 - protein, 21 aa, Artificial Sequence
  Description of Artificial Sequence: Synthetic peptide
  MOD_RES (4)..(4): phosphorylated threonine
QPRTPSPLVMFFRKNLLRLTG

SEQ ID NO: 4055 - protein, 21 aa, Artificial Sequence
  Description of Artificial Sequence: Synthetic peptide
  MOD_RES (4)..(4): phosphorylated threonine
  MOD_RES (6)..(6): phosphorylated serine
QPRTPSPLVVFFRKNLLRLTG

SEQ ID NO: 4056 - protein, 21 aa, Artificial Sequence
  Description of Artificial Sequence: Synthetic peptide
  MOD_RES (4)..(4): phosphorylated threonine
QPRTPSPLVVFFRKNLLRLTG

SEQ ID NO: 4057 - protein, 21 aa, Artificial Sequence
  Description of Artificial Sequence: Synthetic peptide
  MOD_RES (6)..(6): phosphorylated serine
QPSFPSVLPAFFRKNLLRLTG

SEQ ID NO: 4058 - protein, 21 aa, Artificial Sequence
  Description of Artificial Sequence: Synthetic peptide
  MOD_RES (4)..(4): phosphorylated serine
QRLSPLSAAYFFRKNLLRLTG

SEQ ID NO: 4059 - protein, 21 aa, Artificial Sequence
  Description of Artificial Sequence: Synthetic peptide
  MOD_RES (4)..(4): phosphorylated serine
QSDSPQRALYFFRKNLLRLTG

SEQ ID NO: 4060 - protein, 21 aa, Artificial Sequence
  Description of Artificial Sequence: Synthetic peptide
  MOD_RES (4)..(4): phosphorylated serine
QSESPQRALYFFRKNLLRLTG

SEQ ID NO: 4061 - protein, 21 aa, Artificial Sequence
  Description of Artificial Sequence: Synthetic peptide
  MOD_RES (4)..(4): phosphorylated serine
QTDSPQRALYFFRKNLLRLTG

SEQ ID NO: 4062 - protein, 21 aa, Artificial Sequence
  Description of Artificial Sequence: Synthetic peptide
  MOD_RES (4)..(4): phosphorylated serine
QTESPQRALYFFRKNLLRLTG

SEQ ID NO: 4063 - protein, 39 aa, Artificial Sequence
  Description of Artificial Sequence: Synthetic polypeptide
  MOD_RES (14)..(14): phosphorylated serine
QVAMPVKKSPRRSSSDEQGLSYSSLKNVFFRKNLLRLTG

SEQ ID NO: 4064 - protein, 21 aa, Artificial Sequence
  Description of Artificial Sequence: Synthetic peptide
  MOD_RES (4)..(4): phosphorylated serine
QVFSPKKGQKFFRKNLLRLTG

SEQ ID NO: 4065 - protein, 21 aa, Artificial Sequence
  Description of Artificial Sequence: Synthetic peptide
  MOD_RES (4)..(4): phosphorylated serine
QVFSPKKGQYFFRKNLLRLTG

SEQ ID NO: 4066 - protein, 19 aa, Artificial Sequence
  Description of Artificial Sequence: Synthetic peptide
  MOD_RES (4)..(4): phosphorylated serine
RADSPVHMFFRKNLLRLTG

SEQ ID NO: 4067 - protein, 21 aa, Artificial Sequence
  Description of Artificial Sequence: Synthetic peptide
  MOD_RES (4)..(4): phosphorylated serine
RAFSFSKTPKFFRKNLLRLTG

SEQ ID NO: 4068 - protein, 21 aa, Artificial Sequence
  Description of Artificial Sequence: Synthetic peptide
  MOD_RES (4)..(4): phosphorylated serine
RAFSFSKTPYFFRKNLLRLTG

SEQ ID NO: 4069 - protein, 20 aa, Artificial Sequence
  Description of Artificial Sequence: Synthetic peptide
  MOD_RES (4)..(4): phosphorylated serine
RAFSVKFEVFFRKNLLRLTG

SEQ ID NO: 4070 - protein, 20 aa, Artificial Sequence
  Description of Artificial Sequence: Synthetic peptide
  MOD_RES (4)..(4): phosphorylated serine
RAHSEPLALFFRKNLLRLTG

SEQ ID NO: 4071 - protein, 20 aa, Artificial Sequence
  Description of Artificial Sequence: Synthetic peptide
  MOD_RES (4)..(4): phosphorylated serine
RAHSSPASLFFRKNLLRLTG

SEQ ID NO: 4072 - protein, 20 aa, Artificial Sequence
  Description of Artificial Sequence: Synthetic peptide
  MOD_RES (5)..(5): phosphorylated serine
RAHSSPASLFFRKNLLRLTG

SEQ ID NO: 4073 - protein, 20 aa, Artificial Sequence
  Description of Artificial Sequence: Synthetic peptide
  MOD_RES (4)..(4): phosphorylated serine
RAKSPISLKFFRKNLLRLTG

SEQ ID NO: 4074 - protein, 20 aa, Artificial Sequence
  Description of Artificial Sequence: Synthetic peptide
  MOD_RES (4)..(4): phosphorylated serine
RAKSPISLYFFRKNLLRLTG

SEQ ID NO: 4075 - protein, 20 aa, Artificial Sequence
  Description of Artificial Sequence: Synthetic peptide
  MOD_RES (4)..(4): phosphorylated serine
RAPSPSSRFFFRKNLLRLTG

SEQ ID NO: 4076 - protein, 20 aa, Artificial Sequence
  Description of Artificial Sequence: Synthetic peptide
  MOD_RES (4)..(4): phosphorylated serine
RAPSPSSRLFFRKNLLRLTG

SEQ ID NO: 4077 - protein, 20 aa, Artificial Sequence
  Description of Artificial Sequence: Synthetic peptide
  MOD_RES (4)..(4): phosphorylated serine
RAPSPSSRMFFRKNLLRLTG

SEQ ID NO: 4078 - protein, 20 aa, Artificial Sequence
  Description of Artificial Sequence: Synthetic peptide
  MOD_RES (4)..(4): phosphorylated serine
RAPSPSSRVFFRKNLLRLTG

SEQ ID NO: 4079 - protein, 21 aa, Artificial Sequence
  Description of Artificial Sequence: Synthetic peptide
  MOD_RES (6)..(6): phosphorylated serine
RARGISPIVFFFRKNLLRLTG

SEQ ID NO: 4080 - protein, 20 aa, Artificial Sequence
  Description of Artificial Sequence: Synthetic peptide
  MOD_RES (4)..(4): phosphorylated serine
  MOD_RES (8)..(8): phosphorylated serine
RASSDIVSLFFRKNLLRLTG

SEQ ID NO: 4081 - protein, 20 aa, Artificial Sequence
  Description of Artificial Sequence: Synthetic peptide
  MOD_RES (4)..(4): phosphorylated serine
RASSDIVSLFFRKNLLRLTG

SEQ ID NO: 4082 - protein, 20 aa, Artificial Sequence
  Description of Artificial Sequence: Synthetic peptide
  MOD_RES (4)..(4): phosphorylated serine
RASSLSITVFFRKNLLRLTG

SEQ ID NO: 4083 - protein, 20 aa, Artificial Sequence
  Description of Artificial Sequence: Synthetic peptide
  MOD_RES (5)..(5): phosphorylated serine
  MOD_RES (8)..(8): oxidized methionine
REAPSPLMIFFRKNLLRLTG

SEQ ID NO: 4084 - protein, 20 aa, Artificial Sequence
  Description of Artificial Sequence: Synthetic peptide
  MOD_RES (5)..(5): phosphorylated serine
REAPSPLMIFFRKNLLRLTG

SEQ ID NO: 4085 - protein, 20 aa, Artificial Sequence
  Description of Artificial Sequence: Synthetic peptide
  MOD_RES (4)..(4): phosphorylated serine
REASPAPLAFFRKNLLRLTG

SEQ ID NO: 4086 - protein, 20 aa, Artificial Sequence
  Description of Artificial Sequence: Synthetic peptide
  MOD_RES (4)..(4): phosphorylated serine
REASPRLRVFFRKNLLRLTG

SEQ ID NO: 4087 - protein, 21 aa, Artificial Sequence
  Description of Artificial Sequence: Synthetic peptide
  MOD_RES (4)..(4): phosphorylated serine
REASPSRLSVFFRKNLLRLTG

SEQ ID NO: 4088 - protein, 22 aa, Artificial Sequence
  Description of Artificial Sequence: Synthetic peptide
  MOD_RES (4)..(4): phosphorylated serine
REDSTPGKVFLFFRKNLLRLTG

SEQ ID NO: 4089 - protein, 21 aa, Artificial Sequence
  Description of Artificial Sequence: Synthetic peptide
  MOD_RES (6)..(6): phosphorylated threonine
REIMGTPEYLFFRKNLLRLTG

SEQ ID NO: 4090 - protein, 20 aa, Artificial Sequence
  Description of Artificial Sequence: Synthetic peptide
  MOD_RES (4)..(4): phosphorylated serine
  MOD_RES (8)..(8): oxidized methionine
REKSPGRMLFFRKNLLRLTG

SEQ ID NO: 4091 - protein, 20 aa, Artificial Sequence
  Description of Artificial Sequence: Synthetic peptide
  MOD_RES (4)..(4): phosphorylated serine
REKSPGRMLFFRKNLLRLTG

SEQ ID NO: 4092 - protein, 20 aa, Artificial Sequence
  Description of Artificial Sequence: Synthetic peptide
  MOD_RES (4)..(4): phosphorylated serine
REKSPLFQFFFRKNLLRLTG

SEQ ID NO: 4093 - protein, 20 aa, Artificial Sequence
  Description of Artificial Sequence: Synthetic peptide
  MOD_RES (4)..(4): phosphorylated serine
REKSPLFQWFFRKNLLRLTG

SEQ ID NO: 4094 - protein, 20 aa, Artificial Sequence
  Description of Artificial Sequence: Synthetic peptide
  MOD_RES (4)..(4): phosphorylated serine
REKSPLFQYFFRKNLLRLTG

SEQ ID NO: 4095 - protein, 20 aa, Artificial Sequence
  Description of Artificial Sequence: Synthetic peptide
  MOD_RES (8)..(8): phosphorylated serine
RELARKGSLFFRKNLLRLTG

SEQ ID NO: 4096 - protein, 20 aa, Artificial Sequence
  Description of Artificial Sequence: Synthetic peptide
  MOD_RES (4)..(4): phosphorylated serine
RELSPLISLFFRKNLLRLTG

SEQ ID NO: 4097 - protein, 20 aa, Artificial Sequence
  Description of Artificial Sequence: Synthetic peptide
  MOD_RES (4)..(4): phosphorylated serine
REPSPLPELFFRKNLLRLTG

SEQ ID NO: 4098 - protein, 20 aa, Artificial Sequence
  Description of Artificial Sequence: Synthetic peptide
  MOD_RES (4)..(4): phosphorylated serine
RERSPSPSFFFRKNLLRLTG

SEQ ID NO: 4099 - protein, 20 aa, Artificial Sequence
  Description of Artificial Sequence: Synthetic peptide
  MOD_RES (4)..(4): phosphorylated serine
RESSPTRRLFFRKNLLRLTG

SEQ ID NO: 4100 - protein, 20 aa, Artificial Sequence
  Description of Artificial Sequence: Synthetic peptide
  MOD_RES (4)..(4): phosphorylated serine
REVSPAPAVFFRKNLLRLTG

SEQ ID NO: 4101 - protein, 20 aa, Artificial Sequence
  Description of Artificial Sequence: Synthetic peptide
  MOD_RES (5)..(5): phosphorylated serine
REYGSTSSIFFRKNLLRLTG

SEQ ID NO: 4102 - protein, 20 aa, Artificial Sequence
  Description of Artificial Sequence: Synthetic peptide
  MOD_RES (4)..(4): phosphorylated threonine
RFKTQPVTFFFRKNLLRLTG

SEQ ID NO: 4103 - protein, 19 aa, Artificial Sequence
  Description of Artificial Sequence: Synthetic peptide
  MOD_RES (7)..(7): phosphorylated threonine
RGDGYGTFFFRKNLLRLTG

SEQ ID NO: 4104 - protein, 20 aa, Artificial Sequence
  Description of Artificial Sequence: Synthetic peptide
  MOD_RES (4)..(4): phosphorylated serine
RGDSPKIDLFFRKNLLRLTG

SEQ ID NO: 4105 - protein, 22 aa, Artificial Sequence
  Description of Artificial Sequence: Synthetic peptide
  MOD_RES (4)..(4): phosphorylated serine
RIDSKDSASELFFRKNLLRLTG

SEQ ID NO: 4106 - protein, 20 aa, Artificial Sequence
  Description of Artificial Sequence: Synthetic peptide
  MOD_RES (4)..(4): phosphorylated serine
RIGSPLSPKFFRKNLLRLTG

SEQ ID NO: 4107 - protein, 20 aa, Artificial Sequence
  Description of Artificial Sequence: Synthetic peptide
  MOD_RES (4)..(4): phosphorylated serine
RILSGVVTKFFRKNLLRLTG

SEQ ID NO: 4108 - protein, 20 aa, Artificial Sequence
  Description of Artificial Sequence: Synthetic peptide
  MOD_RES (4)..(4): phosphorylated serine
RILSGVVTYFFRKNLLRLTG

SEQ ID NO: 4109 - protein, 21 aa, Artificial Sequence
  Description of Artificial Sequence: Synthetic peptide
  MOD_RES (4)..(4): phosphorylated serine
RILSPSMASKFFRKNLLRLTG

SEQ ID NO: 4110 - protein, 21 aa, Artificial Sequence
  Description of Artificial Sequence: Synthetic peptide
  MOD_RES (4)..(4): phosphorylated serine
RILSPSMASYFFRKNLLRLTG

SEQ ID NO: 4111 - protein, 20 aa, Artificial Sequence
  Description of Artificial Sequence: Synthetic peptide
  MOD_RES (4)..(4): phosphorylated serine
RINSFEEHVFFRKNLLRLTG

SEQ ID NO: 4112 - protein, 20 aa, Artificial Sequence
  Description of Artificial Sequence: Synthetic peptide
  MOD_RES (4)..(4): phosphorylated serine
RIQSKLYRAFFRKNLLRLTG

SEQ ID NO: 4113 - protein, 20 aa, Artificial Sequence
  Description of Artificial Sequence: Synthetic peptide
  MOD_RES (4)..(4): phosphorylated tyrosine
RIQYIQSRFFFRKNLLRLTG

SEQ ID NO: 4114 - protein, 21 aa, Artificial Sequence
  Description of Artificial Sequence: Synthetic peptide
  MOD_RES (4)..(4): phosphorylated tyrosine
RIQYIQSRFYFFRKNLLRLTG

SEQ ID NO: 4115 - protein, 19 aa, Artificial Sequence
  Description of Artificial Sequence: Synthetic peptide
  MOD_RES (3)..(3): phosphorylated serine
RISHELDSFFRKNLLRLTG

SEQ ID NO: 4116 - protein, 20 aa, Artificial Sequence
  Description of Artificial Sequence: Synthetic peptide
  MOD_RES (4)..(4): phosphorylated serine
RITSLIVHVFFRKNLLRLTG

SEQ ID NO: 4117 - protein, 20 aa, Artificial Sequence
  Description of Artificial Sequence: Synthetic peptide
  MOD_RES (5)..(5): phosphorylated tyrosine
RIVQYIQSRFFRKNLLRLTG

SEQ ID NO: 4118 - protein, 18 aa, Artificial Sequence
  Description of Artificial Sequence: Synthetic peptide
  MOD_RES (5)..(5): phosphorylated tyrosine
RIYQYIQFFRKNLLRLTG

SEQ ID NO: 4119 - protein, 20 aa, Artificial Sequence
  Description of Artificial Sequence: Synthetic peptide
  MOD_RES (5)..(5): phosphorylated tyrosine
RIYQYIQSKFFRKNLLRLTG

SEQ ID NO: 4120 - protein, 20 aa, Artificial Sequence
  Description of Artificial Sequence: Synthetic peptide
  MOD_RES (5)..(5): phosphorylated tyrosine
RIYQYIQSRFFRKNLLRLTG

SEQ ID NO: 4121 - protein, 21 aa, Artificial Sequence
  Description of Artificial Sequence: Synthetic peptide
  MOD_RES (5)..(5): phosphorylated tyrosine
RIYQYIQSRFFFRKNLLRLTG

SEQ ID NO: 4122 - protein, 22 aa, Artificial Sequence
  Description of Artificial Sequence: Synthetic peptide
  MOD_RES (5)..(5): phosphorylated tyrosine
RIYQYIQSRFKFFRKNLLRLTG

SEQ ID NO: 4123 - protein, 22 aa, Artificial Sequence
  Description of Artificial Sequence: Synthetic peptide
  MOD_RES (5)..(5): phosphorylated tyrosine
RIYQYIQSRFYFFRKNLLRLTG

SEQ ID NO: 4124 - protein, 21 aa, Artificial Sequence
  Description of Artificial Sequence: Synthetic peptide
  MOD_RES (5)..(5): phosphorylated tyrosine
RIYQYIQSRKFFRKNLLRLTG

SEQ ID NO: 4125 - protein, 21 aa, Artificial Sequence
  Description of Artificial Sequence: Synthetic peptide
  MOD_RES (5)..(5): phosphorylated tyrosine
RIYQYIQSRYFFRKNLLRLTG

SEQ ID NO: 4126 - protein, 20 aa, Artificial Sequence
  Description of Artificial Sequence: Synthetic peptide
  MOD_RES (5)..(5): phosphorylated tyrosine
RIYQYIQSYFFRKNLLRLTG

SEQ ID NO: 4127 - protein, 21 aa, Artificial Sequence
  Description of Artificial Sequence: Synthetic peptide
  MOD_RES (5)..(5): phosphorylated tyrosine
RIYQYLQSRFFFRKNLLRLTG

SEQ ID NO: 4128 - protein, 22 aa, Artificial Sequence
  Description of Artificial Sequence: Synthetic peptide
  MOD_RES (5)..(5): phosphorylated tyrosine
RIYQYLQSRFYFFRKNLLRLTG

SEQ ID NO: 4129 - protein, 20 aa, Artificial Sequence
  Description of Artificial Sequence: Synthetic peptide
  MOD_RES (5)..(5): phosphorylated serine
RKLRSLEQLFFRKNLLRLTG

SEQ ID NO: 4130 - protein, 20 aa, Artificial Sequence
  Description of Artificial Sequence: Synthetic peptide
  MOD_RES (4)..(4): phosphorylated serine
RKLSVILIKFFRKNLLRLTG

SEQ ID NO: 4131 - protein, 20 aa, Artificial Sequence
  Description of Artificial Sequence: Synthetic peptide
  MOD_RES (4)..(4): phosphorylated serine
RKLSVILILFFRKNLLRLTG

SEQ ID NO: 4132 - protein, 20 aa, Artificial Sequence
  Description of Artificial Sequence: Synthetic peptide
  MOD_RES (4)..(4): phosphorylated serine
RKLSVILIYFFRKNLLRLTG

SEQ ID NO: 4133 - protein, 20 aa, Artificial Sequence
  Description of Artificial Sequence: Synthetic peptide
  MOD_RES (4)..(4): phosphorylated serine
RKPSIVTKYFFRKNLLRLTG

SEQ ID NO: 4134 - protein, 20 aa, Artificial Sequence
  Description of Artificial Sequence: Synthetic peptide
  MOD_RES (4)..(4): phosphorylated serine
RKSSIIIRMFFRKNLLRLTG

SEQ ID NO: 4135 - protein, 20 aa, Artificial Sequence
  Description of Artificial Sequence: Synthetic peptide
  MOD_RES (4)..(4): phosphorylated serine
RLASASRALFFRKNLLRLTG

SEQ ID NO: 4136 - protein, 20 aa, Artificial Sequence
  Description of Artificial Sequence: Synthetic peptide
  MOD_RES (4)..(4): phosphorylated serine
RLASFAVRKFFRKNLLRLTG

SEQ ID NO: 4137 - protein, 20 aa, Artificial Sequence
  Description of Artificial Sequence: Synthetic peptide
  MOD_RES (4)..(4): phosphorylated serine
RLASFAVRYFFRKNLLRLTG

SEQ ID NO: 4138 - protein, 21 aa, Artificial Sequence
  Description of Artificial Sequence: Synthetic peptide
  MOD_RES (4)..(4): phosphorylated serine
RLASIELPSMFFRKNLLRLTG

SEQ ID NO: 4139 - protein, 23 aa, Artificial Sequence
  Description of Artificial Sequence: Synthetic peptide
  MOD_RES (4)..(4): phosphorylated serine
RLASIELPSMAVFFRKNLLRLTG

SEQ ID NO: 4140 - protein, 21 aa, Artificial Sequence
  Description of Artificial Sequence: Synthetic peptide
  MOD_RES (4)..(4): phosphorylated serine
RLASIELPSVFFRKNLLRLTG

SEQ ID NO: 4141 - protein, 21 aa, Artificial Sequence
  Description of Artificial Sequence: Synthetic peptide
  MOD_RES (4)..(4): phosphorylated serine
RLASLNAEALFFRKNLLRLTG

SEQ ID NO: 4142 - protein, 21 aa, Artificial Sequence
  Description of Artificial Sequence: Synthetic peptide
  MOD_RES (4)..(4): phosphorylated serine
RLASLNAEAVFFRKNLLRLTG

SEQ ID NO: 4143 - protein, 20 aa, Artificial Sequence
  Description of Artificial Sequence: Synthetic peptide
  MOD_RES (4)..(4): phosphorylated serine
RLASLQSEVFFRKNLLRLTG

SEQ ID NO: 4144 - protein, 20 aa, Artificial Sequence
  Description of Artificial Sequence: Synthetic peptide
  MOD_RES (4)..(4): phosphorylated serine
RLASLSISVFFRKNLLRLTG

SEQ ID NO: 4145 - protein, 20 aa, Artificial Sequence
  Description of Artificial Sequence: Synthetic peptide
  MOD_RES (4)..(4): phosphorylated serine
RLASPLVHKFFRKNLLRLTG

SEQ ID NO: 4146 - protein, 20 aa, Artificial Sequence
  Description of Artificial Sequence: Synthetic peptide
  MOD_RES (4)..(4): phosphorylated serine
RLASPLVHYFFRKNLLRLTG

SEQ ID NO: 4147 - protein, 21 aa, Artificial Sequence
  Description of Artificial Sequence: Synthetic peptide
  MOD_RES (4)..(4): phosphorylated serine
RLASPPPPPKFFRKNLLRLTG

SEQ ID NO: 4148 - protein, 21 aa, Artificial Sequence
  Description of Artificial Sequence: Synthetic peptide
  MOD_RES (4)..(4): phosphorylated serine
RLASPPPPPYFFRKNLLRLTG

SEQ ID NO: 4149 - protein, 20 aa, Artificial Sequence
  Description of Artificial Sequence: Synthetic peptide
  MOD_RES (4)..(4): phosphorylated serine
RLASPTSGVFFRKNLLRLTG

SEQ ID NO: 4150 - protein, 21 aa, Artificial Sequence
  Description of Artificial Sequence: Synthetic peptide
  MOD_RES (4)..(4): phosphorylated serine
RLASPTSGVKFFRKNLLRLTG

SEQ ID NO: 4151 - protein, 22 aa, Artificial Sequence
  Description of Artificial Sequence: Synthetic peptide
  MOD_RES (4)..(4): phosphorylated serine
RLASPTSGVKKFFRKNLLRLTG

SEQ ID NO: 4152 - protein, 22 aa, Artificial Sequence
  Description of Artificial Sequence: Synthetic peptide
  MOD_RES (4)..(4): phosphorylated serine
RLASPTSGVKRFFRKNLLRLTG

SEQ ID NO: 4153 - protein, 22 aa, Artificial Sequence
  Description of Artificial Sequence: Synthetic peptide
  MOD_RES (4)..(4): phosphorylated serine
RLASPTSGVKYFFRKNLLRLTG

SEQ ID NO: 4154 - protein, 20 aa, Artificial Sequence
  Description of Artificial Sequence: Synthetic peptide
  MOD_RES (4)..(4): phosphorylated serine
RLASRPLLLFFRKNLLRLTG

SEQ ID NO: 4155 - protein, 22 aa, Artificial Sequence
  Description of Artificial Sequence: Synthetic peptide
  MOD_RES (4)..(4): phosphorylated serine
RLASSATQVHKFFRKNLLRLTG

SEQ ID NO: 4156 - protein, 20 aa, Artificial Sequence
  Description of Artificial Sequence: Synthetic peptide
  MOD_RES (4)..(4): phosphorylated serine
RLASYLDKVFFRKNLLRLTG

SEQ ID NO: 4157 - protein, 20 aa, Artificial Sequence
  Description of Artificial Sequence: Synthetic peptide
  MOD_RES (4)..(4): phosphorylated serine
RLASYLDRVFFRKNLLRLTG

SEQ ID NO: 4158 - protein, 22 aa, Artificial Sequence
  Description of Artificial Sequence: Synthetic peptide
  MOD_RES (4)..(4): phosphorylated serine
RLDSTPGKVFLFFRKNLLRLTG

SEQ ID NO: 4159 - protein, 22 aa, Artificial Sequence
  Description of Artificial Sequence: Synthetic peptide
  MOD_RES (4)..(4): phosphorylated serine
RLDSTPGKVFVFFRKNLLRLTG

SEQ ID NO: 4160 - protein, 20 aa, Artificial Sequence
  Description of Artificial Sequence: Synthetic peptide
  MOD_RES (4)..(4): phosphorylated serine
RLDSYLRAPFFRKNLLRLTG

SEQ ID NO: 4161 - protein, 18 aa, Artificial Sequence
  Description of Artificial Sequence: Synthetic peptide
  MOD_RES (4)..(4): phosphorylated serine
RLDSYVRFFRKNLLRLTG

SEQ ID NO: 4162 - protein, 19 aa, Artificial Sequence
  Description of Artificial Sequence: Synthetic peptide
  MOD_RES (4)..(4): phosphorylated serine
RLDSYVRSFFRKNLLRLTG

SEQ ID NO: 4163 - protein, 20 aa, Artificial Sequence
  Description of Artificial Sequence: Synthetic peptide
  MOD_RES (4)..(4): phosphorylated serine
RLDSYVRSLFFRKNLLRLTG

SEQ ID NO: 4164 - protein, 20 aa, Artificial Sequence
  Description of Artificial Sequence: Synthetic peptide
  MOD_RES (4)..(4): phosphorylated serine
RLDSYVRSVFFRKNLLRLTG

SEQ ID NO: 4165 - protein, 20 aa, Artificial Sequence
  Description of Artificial Sequence: Synthetic peptide
  MOD_RES (4)..(4): phosphorylated threonine
RLDTGPQSLFFRKNLLRLTG

SEQ ID NO: 4166 - protein, 20 aa, Artificial Sequence
  Description of Artificial Sequence: Synthetic peptide
  MOD_RES (4)..(4): phosphorylated serine
RLESANRRLFFRKNLLRLTG

SEQ ID NO: 4167 - protein, 21 aa, Artificial Sequence
  Description of Artificial Sequence: Synthetic peptide
  MOD_RES (4)..(4): phosphorylated serine
RLFSFSKTPKFFRKNLLRLTG

SEQ ID NO: 4168 - protein, 18 aa, Artificial Sequence
  Description of Artificial Sequence: Synthetic peptide
  MOD_RES (4)..(4): phosphorylated serine
RLFSKELFFRKNLLRLTG

SEQ ID NO: 4169 - protein, 19 aa, Artificial Sequence
  Description of Artificial Sequence: Synthetic peptide
  MOD_RES (4)..(4): phosphorylated serine
RLFSKELRFFRKNLLRLTG

SEQ ID NO: 4170 - protein, 20 aa, Artificial Sequence
  Description of Artificial Sequence: Synthetic peptide
  MOD_RES (4)..(4): phosphorylated serine
RLFSKELRCFFRKNLLRLTG

SEQ ID NO: 4171 - protein, 20 aa, Artificial Sequence
  Description of Artificial Sequence: Synthetic peptide
  MOD_RES (4)..(4): phosphorylated serine
RLFSKELRVFFRKNLLRLTG

SEQ ID NO: 4172 - protein, 21 aa, Artificial Sequence
  Description of Artificial Sequence: Synthetic peptide
  MOD_RES (6)..(6): phosphorylated serine
RLFSLSNPSLFFRKNLLRLTG

SEQ ID NO: 4173 - protein, 20 aa, Artificial Sequence
  Description of Artificial Sequence: Synthetic peptide
  MOD_RES (4)..(4): phosphorylated serine
RLFSPTYGLFFRKNLLRLTG

SEQ ID NO: 4174 - protein, 20 aa, Artificial Sequence
  Description of Artificial Sequence: Synthetic peptide
  MOD_RES (4)..(4): phosphorylated serine
RLFSPTYGVFFRKNLLRLTG

SEQ ID NO: 4175 - protein, 20 aa, Artificial Sequence
  Description of Artificial Sequence: Synthetic peptide
  MOD_RES (4)..(4): phosphorylated serine
RLFSQGQDVFFRKNLLRLTG

SEQ ID NO: 4176 - protein, 20 aa, Artificial Sequence
  Description of Artificial Sequence: Synthetic peptide
  MOD_RES (6)..(6): phosphorylated serine
RLFVGSIPKFFRKNLLRLTG

SEQ ID NO: 4177 - protein, 21 aa, Artificial Sequence
  Description of Artificial Sequence: Synthetic peptide
  MOD_RES (4)..(4): phosphorylated serine
RLGSFHELLLFFRKNLLRLTG

SEQ ID NO: 4178 - protein, 20 aa, Artificial Sequence
  Description of Artificial Sequence: Synthetic peptide
  MOD_RES (4)..(4): phosphorylated serine
RLISFKAEVFFRKNLLRLTG

SEQ ID NO: 4179 - protein, 20 aa, Artificial Sequence
  Description of Artificial Sequence: Synthetic peptide
  MOD_RES (4)..(4): phosphorylated serine
RLISPYKKKFFRKNLLRLTG

SEQ ID NO: 4180 - protein, 20 aa, Artificial Sequence
  Description of Artificial Sequence: Synthetic peptide
  MOD_RES (4)..(4): phosphorylated serine
RLISQDVKLFFRKNLLRLTG

SEQ ID NO: 4181 - protein, 20 aa, Artificial Sequence
  Description of Artificial Sequence: Synthetic peptide
  MOD_RES (4)..(4): phosphorylated serine
RLISQDVKVFFRKNLLRLTG

SEQ ID NO: 4182 - protein, 20 aa, Artificial Sequence
  Description of Artificial Sequence: Synthetic peptide
  MOD_RES (6)..(6): phosphorylated serine
RLKLPSGSKFFRKNLLRLTG

SEQ ID NO: 4183 - protein, 21 aa, Artificial Sequence
  Description of Artificial Sequence: Synthetic peptide
  MOD_RES (6)..(6): phosphorylated serine
RLKLPSGSKKFFRKNLLRLTG

SEQ ID NO: 4184 - protein, 21 aa, Artificial Sequence
  Description of Artificial Sequence: Synthetic peptide
  MOD_RES (6)..(6): phosphorylated serine
RLKLPSGSKYFFRKNLLRLTG

SEQ ID NO: 4185 - protein, 22 aa, Artificial Sequence
  Description of Artificial Sequence: Synthetic peptide
  MOD_RES (4)..(4): phosphorylated serine
RLKSDERPVHIFFRKNLLRLTG

SEQ ID NO: 4186 - protein, 20 aa, Artificial Sequence
  Description of Artificial Sequence: Synthetic peptide
  MOD_RES (4)..(4): phosphorylated serine
RLKSPFRKKFFRKNLLRLTG

SEQ ID NO: 4187 - protein, 22 aa, Artificial Sequence
  Description of Artificial Sequence: Synthetic peptide
  MOD_RES (4)..(4): phosphorylated serine
  MOD_RES (7)..(7): phosphorylated serine
RLKSPGSGHVKFFRKNLLRLTG

SEQ ID NO: 4188 - protein, 20 aa, Artificial Sequence
  Description of Artificial Sequence: Synthetic peptide
  MOD_RES (4)..(4): phosphorylated serine
RLKSPISLKFFRKNLLRLTG

SEQ ID NO: 4189 - protein, 20 aa, Artificial Sequence
  Description of Artificial Sequence: Synthetic peptide
  MOD_RES (4)..(4): phosphorylated serine
RLKSPISLYFFRKNLLRLTG

SEQ ID NO: 4190 - protein, 22 aa, Artificial Sequence
  Description of Artificial Sequence: Synthetic peptide
  MOD_RES (4)..(4): phosphorylated serine
RLKSPSPKSEKFFRKNLLRLTG

SEQ ID NO: 4191 - protein, 22 aa, Artificial Sequence
  Description of Artificial Sequence: Synthetic peptide
  MOD_RES (4)..(4): phosphorylated serine
RLKSPSPKSERFFRKNLLRLTG

SEQ ID NO: 4192 - protein, 22 aa, Artificial Sequence
  Description of Artificial Sequence: Synthetic peptide
  MOD_RES (4)..(4): phosphorylated threonine
RLKTPTSQSYKFFRKNLLRLTG

SEQ ID NO: 4193 - protein, 22 aa, Artificial Sequence
  Description of Artificial Sequence: Synthetic peptide
  MOD_RES (4)..(4): phosphorylated threonine
RLKTPTSQSYRFFRKNLLRLTG

SEQ ID NO: 4194 - protein, 20 aa, Artificial Sequence
  Description of Artificial Sequence: Synthetic peptide
  MOD_RES (5)..(5): phosphorylated threonine
RLKTTPLRKFFRKNLLRLTG

SEQ ID NO: 4195 - protein, 20 aa, Artificial Sequence
  Description of Artificial Sequence: Synthetic peptide
  MOD_RES (5)..(5): phosphorylated threonine
RLKTTPLRRFFRKNLLRLTG

SEQ ID NO: 4196 - protein, 22 aa, Artificial Sequence
  Description of Artificial Sequence: Synthetic peptide
  MOD_RES (6)..(6): phosphorylated serine
RLLDPSSPLALFFRKNLLRLTG

SEQ ID NO: 4197 - protein, 22 aa, Artificial Sequence
  Description of Artificial Sequence: Synthetic peptide
  MOD_RES (7)..(7): phosphorylated serine
RLLDPSSPLALFFRKNLLRLTG

SEQ ID NO: 4198 - protein, 23 aa, Artificial Sequence
  Description of Artificial Sequence: Synthetic peptide
  MOD_RES (8)..(8): phosphorylated serine
RLLDRSPSRSAKFFRKNLLRLTG

SEQ ID NO: 4199 - protein, 23 aa, Artificial Sequence
  Description of Artificial Sequence: Synthetic peptide
  MOD_RES (8)..(8): phosphorylated serine
RLLDRSPSRSAYFFRKNLLRLTG

SEQ ID NO: 4200 - protein, 21 aa, Artificial Sequence
  Description of Artificial Sequence: Synthetic peptide
  MOD_RES (4)..(4): phosphorylated serine
RLLSDGQQHLFFRKNLLRLTG

SEQ ID NO: 4201 - protein, 20 aa, Artificial Sequence
  Description of Artificial Sequence: Synthetic peptide
  MOD_RES (4)..(4): phosphorylated serine
RLLSDLEELFFRKNLLRLTG

SEQ ID NO: 4202 - protein, 20 aa, Artificial Sequence
  Description of Artificial Sequence: Synthetic peptide
  MOD_RES (4)..(4): phosphorylated serine
RLLSDQTRLFFRKNLLRLTG

SEQ ID NO: 4203 - protein, 20 aa, Artificial Sequence
  Description of Artificial Sequence: Synthetic peptide
  MOD_RES (4)..(4): phosphorylated serine
RLLSFQRYLFFRKNLLRLTG

SEQ ID NO: 4204 - protein, 20 aa, Artificial Sequence
  Description of Artificial Sequence: Synthetic peptide
  MOD_RES (4)..(4): phosphorylated serine
RLLSGVVTKFFRKNLLRLTG

SEQ ID NO: 4205 - protein, 20 aa, Artificial Sequence
  Description of Artificial Sequence: Synthetic peptide
  MOD_RES (4)..(4): phosphorylated serine
RLLSGVVTYFFRKNLLRLTG

SEQ ID NO: 4206 - protein, 20 aa, Artificial Sequence
  Description of Artificial Sequence: Synthetic peptide
  MOD_RES (4)..(4): phosphorylated serine
RLLSHISEAFFRKNLLRLTG

SEQ ID NO: 4207 - protein, 20 aa, Artificial Sequence
  Description of Artificial Sequence: Synthetic peptide
  MOD_RES (4)..(4): phosphorylated serine
RLLSHISEVFFRKNLLRLTG

SEQ ID NO: 4208 - protein, 20 aa, Artificial Sequence
  Description of Artificial Sequence: Synthetic peptide
  MOD_RES (4)..(4): phosphorylated serine
RLLSPLSSAFFRKNLLRLTG

SEQ ID NO: 4209 - protein, 22 aa, Artificial Sequence
  Description of Artificial Sequence: Synthetic peptide
  MOD_RES (4)..(4): phosphorylated serine
RLLSPLSSARLFFRKNLLRLTG

SEQ ID NO: 4210 - protein, 20 aa, Artificial Sequence
  Description of Artificial Sequence: Synthetic peptide
  MOD_RES (4)..(4): phosphorylated serine
RLLSPLSSVFFRKNLLRLTG

SEQ ID NO: 4211 - protein, 21 aa, Artificial Sequence
  Description of Artificial Sequence: Synthetic peptide
  MOD_RES (4)..(4): phosphorylated serine
RLLSPQQPALFFRKNLLRLTG

SEQ ID NO: 4212 - protein, 20 aa, Artificial Sequence
  Description of Artificial Sequence: Synthetic peptide
  MOD_RES (4)..(4): phosphorylated serine
RLLSPRPSLFFRKNLLRLTG

SEQ ID NO: 4213 - protein, 21 aa, Artificial Sequence
  Description of Artificial Sequence: Synthetic peptide
  MOD_RES (4)..(4): phosphorylated serine
RLLSPRPSLLFFRKNLLRLTG

SEQ ID NO: 4214 - protein, 21 aa, Artificial Sequence
  Description of Artificial Sequence: Synthetic peptide
  MOD_RES (4)..(4): phosphorylated serine
RLLSPSMASKFFRKNLLRLTG

SEQ ID NO: 4215 - protein, 21 aa, Artificial Sequence
  Description of Artificial Sequence: Synthetic peptide
  MOD_RES (4)..(4): phosphorylated serine
RLLSSGVSEIFFRKNLLRLTG

SEQ ID NO: 4216 - protein, 21 aa, Artificial Sequence
  Description of Artificial Sequence: Synthetic peptide
  MOD_RES (4)..(4): phosphorylated serine
RLLSSGVSEVFFRKNLLRLTG

SEQ ID NO: 4217 - protein, 21 aa, Artificial Sequence
  Description of Artificial Sequence: Synthetic peptide
  MOD_RES (4)..(4): phosphorylated serine
RLLSTDAEAVFFRKNLLRLTG

SEQ ID NO: 4218 - protein, 20 aa, Artificial Sequence
  Description of Artificial Sequence: Synthetic peptide
  MOD_RES (4)..(4): phosphorylated serine
RLLSVEIVKFFRKNLLRLTG

SEQ ID NO: 4219 - protein, 20 aa, Artificial Sequence
  Description of Artificial Sequence: Synthetic peptide
  MOD_RES (4)..(4): phosphorylated serine
RLLSVEIVYFFRKNLLRLTG

SEQ ID NO: 4220 - protein, 21 aa, Artificial Sequence
  Description of Artificial Sequence: Synthetic peptide
  MOD_RES (4)..(4): phosphorylated serine
RLLSVHDFDFFFRKNLLRLTG

SEQ ID NO: 4221 - protein, 20 aa, Artificial Sequence
  Description of Artificial Sequence: Synthetic peptide
  MOD_RES (4)..(4): phosphorylated serine
RLLSVILIKFFRKNLLRLTG

SEQ ID NO: 4222 - protein, 20 aa, Artificial Sequence
  Description of Artificial Sequence: Synthetic peptide
  MOD_RES (4)..(4): phosphorylated serine
RLMSMPVAKFFRKNLLRLTG

SEQ ID NO: 4223 - protein, 20 aa, Artificial Sequence
  Description of Artificial Sequence: Synthetic peptide
  MOD_RES (4)..(4): phosphorylated serine
RLMSMPVAYFFRKNLLRLTG

SEQ ID NO: 4224 - protein, 21 aa, Artificial Sequence
  Description of Artificial Sequence: Synthetic peptide
  MOD_RES (4)..(4): phosphorylated threonine
RLNTSDFQKLFFRKNLLRLTG

SEQ ID NO: 4225 - protein, 20 aa, Artificial Sequence
  Description of Artificial Sequence: Synthetic peptide
  MOD_RES (8)..(8): phosphorylated serine
RLPNRIPSLFFRKNLLRLTG

SEQ ID NO: 4226 - protein, 21 aa, Artificial Sequence
  Description of Artificial Sequence: Synthetic peptide
  MOD_RES (4)..(4): phosphorylated serine
RLPSFLKKNKFFRKNLLRLTG

SEQ ID NO: 4227 - protein, 20 aa, Artificial Sequence
  Description of Artificial Sequence: Synthetic peptide
  MOD_RES (4)..(4): phosphorylated serine
RLPSLVHGYFFRKNLLRLTG

SEQ ID NO: 4228 - protein, 20 aa, Artificial Sequence
  Description of Artificial Sequence: Synthetic peptide
  MOD_RES (4)..(4): phosphorylated serine
RLPSSTLKKFFRKNLLRLTG

SEQ ID NO: 4229 - protein, 20 aa, Artificial Sequence
  Description of Artificial Sequence: Synthetic peptide
  MOD_RES (4)..(4): phosphorylated serine
RLPSSTLKRFFRKNLLRLTG

SEQ ID NO: 4230 - protein, 20 aa, Artificial Sequence
  Description of Artificial Sequence: Synthetic peptide
  MOD_RES (4)..(4): phosphorylated serine
RLPSSTLKYFFRKNLLRLTG

SEQ ID NO: 4231 - protein, 20 aa, Artificial Sequence
  Description of Artificial Sequence: Synthetic peptide
  MOD_RES (4)..(4): phosphorylated serine
RLQSLIKNIFFRKNLLRLTG

SEQ ID NO: 4232 - protein, 20 aa, Artificial Sequence
  Description of Artificial Sequence: Synthetic peptide
  MOD_RES (4)..(4): phosphorylated serine
RLQSTSERLFFRKNLLRLTG

SEQ ID NO: 4233 - protein, 20 aa, Artificial Sequence
  Description of Artificial Sequence: Synthetic peptide
  MOD_RES (4)..(4): phosphorylated serine
RLQSTSERVFFRKNLLRLTG

SEQ ID NO: 4234 - protein, 23 aa, Artificial Sequence
  Description of Artificial Sequence: Synthetic peptide
  MISC_FEATURE (4)..(7): at least one serine residue in the amino acid sequence SLSS is phosphorylated
RLRSLSSPTVTLFFRKNLLRLTG

SEQ ID NO: 4235 - protein, 23 aa, Artificial Sequence
  Description of Artificial Sequence: Synthetic peptide
  MISC_FEATURE (4)..(7): at least one serine residue in the amino acid sequence SLSS is phosphorylated
RLRSLSSPTVTVFFRKNLLRLTG

SEQ ID NO: 4236 - protein, 21 aa, Artificial Sequence
  Description of Artificial Sequence: Synthetic peptide
  MOD_RES (5)..(5): phosphorylated serine
RLRQSPLATKFFRKNLLRLTG

SEQ ID NO: 4237 - protein, 21 aa, Artificial Sequence
  Description of Artificial Sequence: Synthetic peptide
  MOD_RES (5)..(5): phosphorylated serine
RLRQSPLATRFFRKNLLRLTG

SEQ ID NO: 4238 - protein, 21 aa, Artificial Sequence
  Description of Artificial Sequence: Synthetic peptide
  MOD_RES (5)..(5): phosphorylated serine
RLRQSPLATYFFRKNLLRLTG

SEQ ID NO: 4239 - protein, 20 aa, Artificial Sequence
  Description of Artificial Sequence: Synthetic peptide
  MOD_RES (5)..(5): phosphorylated serine
RLRRSPLLKFFRKNLLRLTG

SEQ ID NO: 4240 - protein, 21 aa, Artificial Sequence
  Description of Artificial Sequence: Synthetic peptide
  MOD_RES (4)..(4): phosphorylated serine
RLRSAGAAQKFFRKNLLRLTG

SEQ ID NO: 4241 - protein, 22 aa, Artificial Sequence
  Description of Artificial Sequence: Synthetic peptide
  MOD_RES (4)..(4): phosphorylated serine
RLRSLSSLREKFFRKNLLRLTG

SEQ ID NO: 4242 - protein, 21 aa, Artificial Sequence
  Description of Artificial Sequence: Synthetic peptide
  MOD_RES (4)..(4): phosphorylated serine
RLRSPPPVSKFFRKNLLRLTG

SEQ ID NO: 4243 - protein, 20 aa, Artificial Sequence
  Description of Artificial Sequence: Synthetic peptide
  MOD_RES (4)..(4): phosphorylated serine
RLRSYEDMIFFRKNLLRLTG

SEQ ID NO: 4244 - protein, 21 aa, Artificial Sequence
  Description of Artificial Sequence: Synthetic peptide
  MOD_RES (5)..(5): phosphorylated serine
RLRTSPITRKFFRKNLLRLTG

SEQ ID NO: 4245 - protein, 21 aa, Artificial Sequence
  Description of Artificial Sequence: Synthetic peptide
  MOD_RES (5)..(5): phosphorylated serine
RLRTSPITRRFFRKNLLRLTG

SEQ ID NO: 4246 - protein, 20 aa, Artificial Sequence
  Description of Artificial Sequence: Synthetic peptide
  MOD_RES (5)..(5): phosphorylated threonine
RLSDTPPLLFFRKNLLRLTG

SEQ ID NO: 4247 - protein, 20 aa, Artificial Sequence
  Description of Artificial Sequence: Synthetic peptide
  MOD_RES (4)..(4): phosphorylated serine
RLSSLIRHKFFRKNLLRLTG

SEQ ID NO: 4248 - protein, 22 aa, Artificial Sequence
  Description of Artificial Sequence: Synthetic peptide
  MOD_RES (4)..(4): phosphorylated serine
RLSSLRASTSKFFRKNLLRLTG

SEQ ID NO: 4249 - protein, 20 aa, Artificial Sequence
  Description of Artificial Sequence: Synthetic peptide
  MOD_RES (4)..(4): phosphorylated serine
RLSSPISKKFFRKNLLRLTG

SEQ ID NO: 4250 - protein, 20 aa, Artificial Sequence
  Description of Artificial Sequence: Synthetic peptide
  MOD_RES (4)..(4): phosphorylated serine
RLSSPISKRFFRKNLLRLTG

SEQ ID NO: 4251 - protein, 20 aa, Artificial Sequence
  Description of Artificial Sequence: Synthetic peptide
  MOD_RES (4)..(4): phosphorylated serine
RLSSPISKYFFRKNLLRLTG

SEQ ID NO: 4252 - protein, 20 aa, Artificial Sequence
  Description of Artificial Sequence: Synthetic peptide
  MOD_RES (3)..(3): phosphorylated serine
RLSSPLHFVFFRKNLLRLTG

SEQ ID NO: 4253 - protein, 20 aa, Artificial Sequence
  Description of Artificial Sequence: Synthetic peptide
  MOD_RES (4)..(4): phosphorylated serine
RLSSPLHFVFFRKNLLRLTG

SEQ ID NO: 4254 - protein, 20 aa, Artificial Sequence
  Description of Artificial Sequence: Synthetic peptide
  MOD_RES (4)..(4): phosphorylated serine
RLSSPVLHKFFRKNLLRLTG

SEQ ID NO: 4255 - protein, 20 aa, Artificial Sequence
  Description of Artificial Sequence: Synthetic peptide
  MOD_RES (4)..(4): phosphorylated serine
RLSSPVLHRFFRKNLLRLTG

SEQ ID NO: 4256 - protein, 20 aa, Artificial Sequence
  Description of Artificial Sequence: Synthetic peptide
  MOD_RES (4)..(4): phosphorylated serine
RLSSPVLHYFFRKNLLRLTG

SEQ ID NO: 4257 - protein, 20 aa, Artificial Sequence
  Description of Artificial Sequence: Synthetic peptide
  MOD_RES (4)..(4): phosphorylated serine
RLSSRFSSKFFRKNLLRLTG

SEQ ID NO: 4258 - protein, 20 aa, Artificial Sequence
  Description of Artificial Sequence: Synthetic peptide
  MOD_RES (4)..(4): phosphorylated serine
RLSSRFSSRFFRKNLLRLTG

SEQ ID NO: 4259 - protein, 20 aa, Artificial Sequence
  Description of Artificial Sequence: Synthetic peptide
  MOD_RES (4)..(4): phosphorylated serine
RLSSRFSSYFFRKNLLRLTG

SEQ ID NO: 4260 - protein, 20 aa, Artificial Sequence
  Description of Artificial Sequence: Synthetic peptide
  MOD_RES (4)..(4): phosphorylated serine
RLSSRYSQKFFRKNLLRLTG

SEQ ID NO: 4261 - protein, 20 aa, Artificial Sequence
  Description of Artificial Sequence: Synthetic peptide
  MOD_RES (4)..(4): phosphorylated serine
RLSSRYSQYFFRKNLLRLTG

SEQ ID NO: 4262 - protein, 21 aa, Artificial Sequence
  Description of Artificial Sequence: Synthetic peptide
  MOD_RES (4)..(4): phosphorylated serine
RLSSVKLISKFFRKNLLRLTG

SEQ ID NO: 4263 - protein, 21 aa, Artificial Sequence
  Description of Artificial Sequence: Synthetic peptide
  MOD_RES (4)..(4): phosphorylated serine
RLSSVKLISYFFRKNLLRLTG

SEQ ID NO: 4264 - protein, 21 aa, Artificial Sequence
  Description of Artificial Sequence: Synthetic peptide
  MOD_RES (5)..(5): phosphorylated serine
RLTFSPTYGVFFRKNLLRLTG

SEQ ID NO: 4265 - protein, 20 aa, Artificial Sequence
  Description of Artificial Sequence: Synthetic peptide
  MOD_RES (4)..(4): phosphorylated serine
RLVSLSMRKFFRKNLLRLTG

SEQ ID NO: 4266 - protein, 20 aa, Artificial Sequence
  Description of Artificial Sequence: Synthetic peptide
  MOD_RES (4)..(4): phosphorylated serine
RLVSLSMRYFFRKNLLRLTG

SEQ ID NO: 4267 - protein, 20 aa, Artificial Sequence
  Description of Artificial Sequence: Synthetic peptide
  MOD_RES (5)..(5): phosphorylated serine
RLYKSPLRHFFRKNLLRLTG

SEQ ID NO: 4268 - protein, 20 aa, Artificial Sequence
  Description of Artificial Sequence: Synthetic peptide
  MOD_RES (5)..(5): phosphorylated serine
RLYKSPLRKFFRKNLLRLTG

SEQ ID NO: 4269 - protein, 20 aa, Artificial Sequence
  Description of Artificial Sequence: Synthetic peptide
  MOD_RES (5)..(5): phosphorylated tyrosine
RLYQYIQSKFFRKNLLRLTG

SEQ ID NO: 4270 - protein, 20 aa, Artificial Sequence
  Description of Artificial Sequence: Synthetic peptide
  MOD_RES (5)..(5): phosphorylated tyrosine
RLYQYIQSRFFRKNLLRLTG

SEQ ID NO: 4271 - protein, 22 aa, Artificial Sequence
  Description of Artificial Sequence: Synthetic peptide
  MOD_RES (5)..(5): phosphorylated tyrosine
RLYQYIQSRFKFFRKNLLRLTG

SEQ ID NO: 4272 - protein, 22 aa, Artificial Sequence
  Description of Artificial Sequence: Synthetic peptide
  MOD_RES (5)..(5): phosphorylated tyrosine
RLYQYIQSRFYFFRKNLLRLTG

SEQ ID NO: 4273 - protein, 20 aa, Artificial Sequence
  Description of Artificial Sequence: Synthetic peptide
  MOD_RES (5)..(5): phosphorylated tyrosine
RLYQYIQSYFFRKNLLRLTG

SEQ ID NO: 4274 - protein, 20 aa, Artificial Sequence
  Description of Artificial Sequence: Synthetic peptide
  MOD_RES (5)..(5): phosphorylated tyrosine
RLYQYLQSKFFRKNLLRLTG

SEQ ID NO: 4275 - protein, 21 aa, Artificial Sequence
  Description of Artificial Sequence: Synthetic peptide
  MOD_RES (5)..(5): phosphorylated tyrosine
RLYQYLQSRFFFRKNLLRLTG

SEQ ID NO: 4276 - protein, 22 aa, Artificial Sequence
  Description of Artificial Sequence: Synthetic peptide
  MOD_RES (5)..(5): phosphorylated tyrosine
RLYQYLQSRFKFFRKNLLRLTG

SEQ ID NO: 4277 - protein, 22 aa, Artificial Sequence
  Description of Artificial Sequence: Synthetic peptide
  MOD_RES (5)..(5): phosphorylated tyrosine
RLYQYLQSRFYFFRKNLLRLTG

SEQ ID NO: 4278 - protein, 21 aa, Artificial Sequence
  Description of Artificial Sequence: Synthetic peptide
  MOD_RES (5)..(5): phosphorylated tyrosine
RLYQYLQSRKFFRKNLLRLTG

SEQ ID NO: 4279 - protein, 21 aa, Artificial Sequence
  Description of Artificial Sequence: Synthetic peptide
  MOD_RES (4)..(4): phosphorylated serine
RLYSGPMNKVFFRKNLLRLTG

SEQ ID NO: 4280 - protein, 20 aa, Artificial Sequence
  Description of Artificial Sequence: Synthetic peptide
  MOD_RES (4)..(4): phosphorylated serine
  MOD_RES (8)..(8): phosphorylated serine
RLYSGSRSKFFRKNLLRLTG

SEQ ID NO: 4281 - protein, 20 aa, Artificial Sequence
  Description of Artificial Sequence: Synthetic peptide
  MOD_RES (4)..(4): phosphorylated serine
  MOD_RES (8)..(8): phosphorylated serine
RLYSGSRSRFFRKNLLRLTG

SEQ ID NO: 4282 - protein, 20 aa, Artificial Sequence
  Description of Artificial Sequence: Synthetic peptide
  MOD_RES (4)..(4): phosphorylated serine
  MOD_RES (8)..(8): phosphorylated serine
RLYSGSRSYFFRKNLLRLTG

SEQ ID NO: 4283 - protein, 20 aa, Artificial Sequence
  Description of Artificial Sequence: Synthetic peptide
  MOD_RES (4)..(4): phosphorylated serine
RLYSKSRDKFFRKNLLRLTG

SEQ ID NO: 4284 - protein, 21 aa, Artificial Sequence
  Description of Artificial Sequence: Synthetic peptide
  MOD_RES (4)..(4): phosphorylated serine
RLYSPDHRQKFFRKNLLRLTG

SEQ ID NO: 4285 - protein, 20 aa, Artificial Sequence
  Description of Artificial Sequence: Synthetic peptide
  MOD_RES (4)..(4): phosphorylated serine
RLYSPERSKFFRKNLLRLTG

SEQ ID NO: 4286 - protein, 20 aa, Artificial Sequence
  Description of Artificial Sequence: Synthetic peptide
  MOD_RES (4)..(4): phosphorylated serine
RLYSPRNSKFFRKNLLRLTG

SEQ ID NO: 4287 - protein, 20 aa, Artificial Sequence
  Description of Artificial Sequence: Synthetic peptide
  MOD_RES (4)..(4): phosphorylated serine
RLYSPYNHKFFRKNLLRLTG

SEQ ID NO: 4288 - protein, 20 aa, Artificial Sequence
  Description of Artificial Sequence: Synthetic peptide
  MOD_RES (4)..(4): phosphorylated serine
RLYSPYNHRFFRKNLLRLTG

SEQ ID NO: 4289 - protein, 20 aa, Artificial Sequence
  Description of Artificial Sequence: Synthetic peptide
  MOD_RES (4)..(4): phosphorylated serine
RLYSPYNHYFFRKNLLRLTG

SEQ ID NO: 4290 - protein, 20 aa, Artificial Sequence
  Description of Artificial Sequence: Synthetic peptide
  MOD_RES (6)..(6): phosphorylated serine
RLYSRSFSKFFRKNLLRLTG

SEQ ID NO: 4291 - protein, 20 aa, Artificial Sequence
  Description of Artificial Sequence: Synthetic peptide
  MOD_RES (6)..(6): phosphorylated serine
RLYSRSFSYFFRKNLLRLTG

SEQ ID NO: 4292 - protein, 20 aa, Artificial Sequence
  Description of Artificial Sequence: Synthetic peptide
  MOD_RES (4)..(4): phosphorylated serine
RLYSYPRQKFFRKNLLRLTG

SEQ ID NO: 4293 - protein, 25 aa, Artificial Sequence
  Description of Artificial Sequence: Synthetic peptide
  MOD_RES (12)..(12): phosphorylated serine
RLYVTTSTRTYSLGFFRKNLLRLTG

SEQ ID NO: 4294 - protein, 25 aa, Artificial Sequence
  Description of Artificial Sequence: Synthetic peptide
  MOD_RES (12)..(12): phosphorylated serine
RLYVTTSTRTYSLKFFRKNLLRLTG

SEQ ID NO: 4295 - protein, 25 aa, Artificial Sequence
  Description of Artificial Sequence: Synthetic peptide
  MOD_RES (12)..(12): phosphorylated serine
RLYVTTSTRTYSLYFFRKNLLRLTG

SEQ ID NO: 4296 - protein, 21 aa, Artificial Sequence
  Description of Artificial Sequence: Synthetic peptide
  MOD_RES (4)..(4): phosphorylated serine
RMASPPPPPKFFRKNLLRLTG

SEQ ID NO: 4297 - protein, 20 aa, Artificial Sequence
  Description of Artificial Sequence: Synthetic peptide
  MOD_RES (4)..(4): phosphorylated serine
RMASPTSGVFFRKNLLRLTG

SEQ ID NO: 4298 - protein, 21 aa, Artificial Sequence
  Description of Artificial Sequence: Synthetic peptide
  MOD_RES (4)..(4): phosphorylated serine
RMASPTSGVKFFRKNLLRLTG

SEQ ID NO: 4299 - protein, 22 aa, Artificial Sequence
  Description of Artificial Sequence: Synthetic peptide
  MOD_RES (4)..(4): phosphorylated serine
RMASPTSGVKKFFRKNLLRLTG

SEQ ID NO: 4300 - protein, 22 aa, Artificial Sequence
  Description of Artificial Sequence: Synthetic peptide
  MOD_RES (4)..(4): phosphorylated serine
RMASPTSGVKRFFRKNLLRLTG

SEQ ID NO: 4301 - protein, 22 aa, Artificial Sequence
  Description of Artificial Sequence: Synthetic peptide
  MOD_RES (4)..(4): phosphorylated serine
RMASPTSGVKYFFRKNLLRLTG

SEQ ID NO: 4302 - protein, 22 aa, Artificial Sequence
  Description of Artificial Sequence: Synthetic peptide
  MOD_RES (4)..(4): phosphorylated serine
RMASSATQVHKFFRKNLLRLTG

SEQ ID NO: 4303 - protein, 22 aa, Artificial Sequence
  Description of Artificial Sequence: Synthetic peptide
  MOD_RES (4)..(4): phosphorylated serine
RMDSTPGKVFLFFRKNLLRLTG

SEQ ID NO: 4304 - protein, 22 aa, Artificial Sequence
  Description of Artificial Sequence: Synthetic peptide
  MOD_RES (4)..(4): phosphorylated serine
RMDSTPGKVFVFFRKNLLRLTG

SEQ ID NO: 4305 - protein, 20 aa, Artificial Sequence
  Description of Artificial Sequence: Synthetic peptide
  MOD_RES (4)..(4): phosphorylated serine
RMDSYVRSLFFRKNLLRLTG

SEQ ID NO: 4306 - protein, 20 aa, Artificial Sequence
  Description of Artificial Sequence: Synthetic peptide
  MOD_RES (4)..(4): phosphorylated serine
RMDSYVRSVFFRKNLLRLTG

SEQ ID NO: 4307 - protein, 20 aa, Artificial Sequence
  Description of Artificial Sequence: Synthetic peptide
  MOD_RES (5)..(5): phosphorylated threonine
RMFPTPPSLFFRKNLLRLTG

SEQ ID NO: 4308 - protein, 21 aa, Artificial Sequence
  Description of Artificial Sequence: Synthetic peptide
  MOD_RES (4)..(4): phosphorylated serine
RMFSFSKTPKFFRKNLLRLTG

SEQ ID NO: 4309 - protein, 20 aa, Artificial Sequence
  Description of Artificial Sequence: Synthetic peptide
  MOD_RES (4)..(4): phosphorylated serine
RMFSKELRCFFRKNLLRLTG

SEQ ID NO: 4310 - protein, 20 aa, Artificial Sequence
  Description of Artificial Sequence: Synthetic peptide
  MOD_RES (4)..(4): phosphorylated serine
RMFSKELRVFFRKNLLRLTG

SEQ ID NO: 4311 - protein, 20 aa, Artificial Sequence
  Description of Artificial Sequence: Synthetic peptide
  MOD_RES (4)..(4): phosphorylated serine
RMFSPMEEKFFRKNLLRLTG

SEQ ID NO: 4312 - protein, 23 aa, Artificial Sequence
  Description of Artificial Sequence: Synthetic peptide
  MOD_RES (4)..(4): phosphorylated serine
RMFSPMEEKELLFFRKNLLRLTG

SEQ ID NO: 4313 - protein, 20 aa, Artificial Sequence
  Description of Artificial Sequence: Synthetic peptide
  MOD_RES (4)..(4): phosphorylated serine
RMFSPTYGLFFRKNLLRLTG

SEQ ID NO: 4314 - protein, 20 aa, Artificial Sequence
  Description of Artificial Sequence: Synthetic peptide
  MOD_RES (4)..(4): phosphorylated serine
RMFSPTYGVFFRKNLLRLTG

SEQ ID NO: 4315 - protein, 20 aa, Artificial Sequence
  Description of Artificial Sequence: Synthetic peptide
  MOD_RES (4)..(4): phosphorylated serine
RMISPYKKKFFRKNLLRLTG

SEQ ID NO: 4316 - protein, 20 aa, Artificial Sequence
  Description of Artificial Sequence: Synthetic peptide
  MOD_RES (4)..(4): phosphorylated serine
RMISQDVKLFFRKNLLRLTG

SEQ ID NO: 4317 - protein, 20 aa, Artificial Sequence
  Description of Artificial Sequence: Synthetic peptide
  MOD_RES (4)..(4): phosphorylated serine
RMISQDVKVFFRKNLLRLTG

SEQ ID NO: 4318 - protein, 20 aa, Artificial Sequence
  Description of Artificial Sequence: Synthetic peptide
  MOD_RES (4)..(4): phosphorylated serine
RMISTGSELFFRKNLLRLTG

SEQ ID NO: 4319 - protein, 20 aa, Artificial Sequence
  Description of Artificial Sequence: Synthetic peptide
  MOD_RES (6)..(6): phosphorylated serine
RMKLPSGSKFFRKNLLRLTG

SEQ ID NO: 4320 - protein, 21 aa, Artificial Sequence
  Description of Artificial Sequence: Synthetic peptide
  MOD_RES (6)..(6): phosphorylated serine
RMKLPSGSKKFFRKNLLRLTG

SEQ ID NO: 4321 - protein, 21 aa, Artificial Sequence
  Description of Artificial Sequence: Synthetic peptide
  MOD_RES (6)..(6): phosphorylated serine
RMKLPSGSKYFFRKNLLRLTG

SEQ ID NO: 4322 - protein, 20 aa, Artificial Sequence
  Description of Artificial Sequence: Synthetic peptide
  MOD_RES (4)..(4): phosphorylated serine
RMKSPFRKKFFRKNLLRLTG

SEQ ID NO: 4323 - protein, 22 aa, Artificial Sequence
  Description of Artificial Sequence: Synthetic peptide
  MOD_RES (4)..(4): phosphorylated serine
  MOD_RES (7)..(7): phosphorylated serine
RMKSPGSGHVKFFRKNLLRLTG

SEQ ID NO: 4324 - protein, 22 aa, Artificial Sequence
  Description of Artificial Sequence: Synthetic peptide
  MOD_RES (4)..(4): phosphorylated serine
RMKSPSPKSEKFFRKNLLRLTG

SEQ ID NO: 4325 - protein, 22 aa, Artificial Sequence
  Description of Artificial Sequence: Synthetic peptide
  MOD_RES (4)..(4): phosphorylated threonine
RMKTPTSQSYKFFRKNLLRLTG

SEQ ID NO: 4326 - protein, 22 aa, Artificial Sequence
  Description of Artificial Sequence: Synthetic peptide
  MOD_RES (4)..(4): phosphorylated threonine
RMKTPTSQSYRFFRKNLLRLTG

SEQ ID NO: 4327 - protein, 20 aa, Artificial Sequence
  Description of Artificial Sequence: Synthetic peptide
  MOD_RES (5)..(5): phosphorylated threonine
RMKTTPLRKFFRKNLLRLTG

SEQ ID NO: 4328 - protein, 20 aa, Artificial Sequence
  Description of Artificial Sequence: Synthetic peptide
  MOD_RES (5)..(5): phosphorylated threonine
RMKTTPLRRFFRKNLLRLTG

SEQ ID NO: 4329 - protein, 23 aa, Artificial Sequence
  Description of Artificial Sequence: Synthetic peptide
  MOD_RES (8)..(8): phosphorylated serine
RMLDRSPSRSAKFFRKNLLRLTG

SEQ ID NO: 4330 - protein, 23 aa, Artificial Sequence
  Description of Artificial Sequence: Synthetic peptide
  MOD_RES (8)..(8): phosphorylated serine
RMLDRSPSRSAYFFRKNLLRLTG

SEQ ID NO: 4331 - protein, 20 aa, Artificial Sequence
  Description of Artificial Sequence: Synthetic peptide
  MOD_RES (4)..(4): phosphorylated serine
RMLSHISEAFFRKNLLRLTG

SEQ ID NO: 4332 - protein, 20 aa, Artificial Sequence
  Description of Artificial Sequence: Synthetic peptide
  MOD_RES (4)..(4): phosphorylated serine
RMLSHISEVFFRKNLLRLTG

SEQ ID NO: 4333 - protein, 21 aa, Artificial Sequence
  Description of Artificial Sequence: Synthetic peptide
  MOD_RES (4)..(4): phosphorylated serine
RMLSLRDQRLFFRKNLLRLTG

SEQ ID NO: 4334 - protein, 20 aa, Artificial Sequence
  Description of Artificial Sequence: Synthetic peptide
  MOD_RES (4)..(4): phosphorylated serine
RMLSPLSSAFFRKNLLRLTG

SEQ ID NO: 4335 - protein, 20 aa, Artificial Sequence
  Description of Artificial Sequence: Synthetic peptide
  MOD_RES (4)..(4): phosphorylated serine
RMLSPLSSVFFRKNLLRLTG

SEQ ID NO: 4336 - protein, 21 aa, Artificial Sequence
  Description of Artificial Sequence: Synthetic peptide
  MOD_RES (4)..(4): phosphorylated serine
RMLSPSMASKFFRKNLLRLTG

SEQ ID NO: 4337 - protein, 21 aa, Artificial Sequence
  Description of Artificial Sequence: Synthetic peptide
  MOD_RES (4)..(4): phosphorylated serine
RMLSSGVSEIFFRKNLLRLTG

SEQ ID NO: 4338 - protein, 21 aa, Artificial Sequence
  Description of Artificial Sequence: Synthetic peptide
  MOD_RES (4)..(4): phosphorylated serine
RMLSSGVSEVFFRKNLLRLTG

SEQ ID NO: 4339 - protein, 20 aa, Artificial Sequence
  Description of Artificial Sequence: Synthetic peptide
  MOD_RES (4)..(4): phosphorylated serine
RMLSVILIKFFRKNLLRLTG

SEQ ID NO: 4340 - protein, 21 aa, Artificial Sequence
  Description of Artificial Sequence: Synthetic peptide
  MOD_RES (4)..(4): phosphorylated serine
RMPSFLKKNKFFRKNLLRLTG

SEQ ID NO: 4341 - protein, 20 aa, Artificial Sequence
  Description of Artificial Sequence: Synthetic peptide
  MOD_RES (4)..(4): phosphorylated serine
RMPSSTLKKFFRKNLLRLTG

SEQ ID NO: 4342 - protein, 20 aa, Artificial Sequence
  Description of Artificial Sequence: Synthetic peptide
  MOD_RES (4)..(4): phosphorylated serine
RMPSSTLKRFFRKNLLRLTG

SEQ ID NO: 4343 - protein, 20 aa, Artificial Sequence
  Description of Artificial Sequence: Synthetic peptide
  MOD_RES (4)..(4): phosphorylated serine
RMQSTSERLFFRKNLLRLTG

SEQ ID NO: 4344 - protein, 20 aa, Artificial Sequence
  Description of Artificial Sequence: Synthetic peptide
  MOD_RES (4)..(4): phosphorylated serine
RMQSTSERVFFRKNLLRLTG

SEQ ID NO: 4345 - protein, 21 aa, Artificial Sequence
  Description of Artificial Sequence: Synthetic peptide
  MOD_RES (5)..(5): phosphorylated serine
RMRQSPLATKFFRKNLLRLTG

SEQ ID NO: 4346 - protein, 21 aa, Artificial Sequence
  Description of Artificial Sequence: Synthetic peptide
  MOD_RES (5)..(5): phosphorylated serine
RMRQSPLATRFFRKNLLRLTG

SEQ ID NO: 4347 - protein, 20 aa, Artificial Sequence
  Description of Artificial Sequence: Synthetic peptide
  MOD_RES (5)..(5): phosphorylated serine
RMRRSPLLKFFRKNLLRLTG

SEQ ID NO: 4348 - protein, 21 aa, Artificial Sequence
  Description of Artificial Sequence: Synthetic peptide
  MOD_RES (4)..(4): phosphorylated serine
RMRSAGAAQKFFRKNLLRLTG

SEQ ID NO: 4349 - protein, 22 aa, Artificial Sequence
  Description of Artificial Sequence: Synthetic peptide
  MOD_RES (4)..(4): phosphorylated serine
RMRSLSSLREKFFRKNLLRLTG

SEQ ID NO: 4350 - protein, 21 aa, Artificial Sequence
  Description of Artificial Sequence: Synthetic peptide
  MOD_RES (4)..(4): phosphorylated serine
RMRSPPPVSKFFRKNLLRLTG

SEQ ID NO: 4351 - protein, 21 aa, Artificial Sequence
  Description of Artificial Sequence: Synthetic peptide
  MOD_RES (5)..(5): phosphorylated serine
RMRTSPITRKFFRKNLLRLTG

SEQ ID NO: 4352 - protein, 21 aa, Artificial Sequence
  Description of Artificial Sequence: Synthetic peptide
  MOD_RES (5)..(5): phosphorylated serine
RMRTSPITRRFFRKNLLRLTG

SEQ ID NO: 4353 - protein, 20 aa, Artificial Sequence
  Description of Artificial Sequence: Synthetic peptide
  MOD_RES (4)..(4): phosphorylated serine
RMSSLIRHKFFRKNLLRLTG

SEQ ID NO: 4354 - protein, 20 aa, Artificial Sequence
  Description of Artificial Sequence: Synthetic peptide
  MOD_RES (4)..(4): phosphorylated serine
RMSSPISKKFFRKNLLRLTG

SEQ ID NO: 4355 - protein, 20 aa, Artificial Sequence
  Description of Artificial Sequence: Synthetic peptide
  MOD_RES (4)..(4): phosphorylated serine
RMSSPISKRFFRKNLLRLTG

SEQ ID NO: 4356 - protein, 20 aa, Artificial Sequence
  Description of Artificial Sequence: Synthetic peptide
  MOD_RES (4)..(4): phosphorylated serine
RMSSPLHFVFFRKNLLRLTG

SEQ ID NO: 4357 - protein, 20 aa, Artificial Sequence
  Description of Artificial Sequence: Synthetic peptide
  MOD_RES (4)..(4): phosphorylated serine
RMSSPVLHKFFRKNLLRLTG

SEQ ID NO: 4358 - protein, 20 aa, Artificial Sequence
  Description of Artificial Sequence: Synthetic peptide
  MOD_RES (4)..(4): phosphorylated serine
RMSSRYSQKFFRKNLLRLTG

SEQ ID NO: 4359 - protein, 21 aa, Artificial Sequence
  Description of Artificial Sequence: Synthetic peptide
  MOD_RES (4)..(4): phosphorylated serine
RMSSVKLISKFFRKNLLRLTG

SEQ ID NO: 4360 - protein, 21 aa, Artificial Sequence
  Description of Artificial Sequence: Synthetic peptide
  MOD_RES (4)..(4): phosphorylated serine
RMSSVKLISYFFRKNLLRLTG

SEQ ID NO: 4361 - protein, 20 aa, Artificial Sequence
  Description of Artificial Sequence: Synthetic peptide
  MOD_RES (4)..(4): phosphorylated serine
RMVSLSMRKFFRKNLLRLTG

SEQ ID NO: 4362 - protein, 20 aa, Artificial Sequence
  Description of Artificial Sequence: Synthetic peptide
  MOD_RES (4)..(4): phosphorylated serine
RMVSLSMRYFFRKNLLRLTG

SEQ ID NO: 4363 - protein, 20 aa, Artificial Sequence
  Description of Artificial Sequence: Synthetic peptide
  MOD_RES (5)..(5): phosphorylated serine
RMYKSPLRHFFRKNLLRLTG

SEQ ID NO: 4364 - protein, 20 aa, Artificial Sequence
  Description of Artificial Sequence: Synthetic peptide
  MOD_RES (5)..(5): phosphorylated serine
RMYKSPLRKFFRKNLLRLTG

SEQ ID NO: 4365 - protein, 20 aa, Artificial Sequence
  Description of Artificial Sequence: Synthetic peptide
  MOD_RES (5)..(5): phosphorylated tyrosine
RMYQYIQSKFFRKNLLRLTG

SEQ ID NO: 4366 - protein, 20 aa, Artificial Sequence
  Description of Artificial Sequence: Synthetic peptide
  MOD_RES (5)..(5): phosphorylated tyrosine
RMYQYIQSRFFRKNLLRLTG

SEQ ID NO: 4367 - protein, 21 aa, Artificial Sequence
  Description of Artificial Sequence: Synthetic peptide
  MOD_RES (5)..(5): phosphorylated tyrosine
RMYQYLQSRFFFRKNLLRLTG

SEQ ID NO: 4368 - protein, 22 aa, Artificial Sequence
  Description of Artificial Sequence: Synthetic peptide
  MOD_RES (5)..(5): phosphorylated tyrosine
RMYQYLQSRFKFFRKNLLRLTG

SEQ ID NO: 4369 - protein, 22 aa, Artificial Sequence
  Description of Artificial Sequence: Synthetic peptide
  MOD_RES (5)..(5): phosphorylated tyrosine
RMYQYLQSRFYFFRKNLLRLTG

SEQ ID NO: 4370 - protein, 21 aa, Artificial Sequence
  Description of Artificial Sequence: Synthetic peptide
  MOD_RES (5)..(5): phosphorylated tyrosine
RMYQYLQSRKFFRKNLLRLTG

SEQ ID NO: 4371 - protein, 20 aa, Artificial Sequence
  Description of Artificial Sequence: Synthetic peptide
  MOD_RES (4)..(4): phosphorylated serine
RMYSFDDVLFFRKNLLRLTG

SEQ ID NO: 4372 - protein, 20 aa, Artificial Sequence
  Description of Artificial Sequence: Synthetic peptide
  MOD_RES (4)..(4): phosphorylated serine
  MOD_RES (8)..(8): phosphorylated serine
RMYSGSRSKFFRKNLLRLTG

SEQ ID NO: 4373 - protein, 20 aa, Artificial Sequence
  Description of Artificial Sequence: Synthetic peptide
  MOD_RES (4)..(4): phosphorylated serine
  MOD_RES (8)..(8): phosphorylated serine
RMYSGSRSRFFRKNLLRLTG

SEQ ID NO: 4374 - protein, 20 aa, Artificial Sequence
  Description of Artificial Sequence: Synthetic peptide
  MOD_RES (4)..(4): phosphorylated serine
RMYSKSRDHFFRKNLLRLTG

SEQ ID NO: 4375 - protein, 20 aa, Artificial Sequence
  Description of Artificial Sequence: Synthetic peptide
  MOD_RES (4)..(4): phosphorylated serine
RMYSKSRDKFFRKNLLRLTG

SEQ ID NO: 4376 - protein, 20 aa, Artificial Sequence
  Description of Artificial Sequence: Synthetic peptide
  MOD_RES (4)..(4): phosphorylated serine
RMYSKSRDYFFRKNLLRLTG

SEQ ID NO: 4377 - protein, 21 aa, Artificial Sequence
  Description of Artificial Sequence: Synthetic peptide
  MOD_RES (4)..(4): phosphorylated serine
RMYSPDHRQKFFRKNLLRLTG

SEQ ID NO: 4378 - protein, 20 aa, Artificial Sequence
  Description of Artificial Sequence: Synthetic peptide
  MOD_RES (4)..(4): phosphorylated serine
RMYSPERSKFFRKNLLRLTG

SEQ ID NO: 4379 - protein, 21 aa, Artificial Sequence
  Description of Artificial Sequence: Synthetic peptide
  MOD_RES (4)..(4): phosphorylated serine
RMYSPIIYQAFFRKNLLRLTG

SEQ ID NO: 4380 - protein, 21 aa, Artificial Sequence
  Description of Artificial Sequence: Synthetic peptide
  MOD_RES (4)..(4): phosphorylated serine
RMYSPIPPSLFFRKNLLRLTG

SEQ ID NO: 4381 - protein, 20 aa, Artificial Sequence
  Description of Artificial Sequence: Synthetic peptide
  MOD_RES (4)..(4): phosphorylated serine
RMYSPRNSKFFRKNLLRLTG

SEQ ID NO: 4382 - protein, 20 aa, Artificial Sequence
  Description of Artificial Sequence: Synthetic peptide
  MOD_RES (4)..(4): phosphorylated serine
RMYSPYNHKFFRKNLLRLTG

SEQ ID NO: 4383 - protein, 20 aa, Artificial Sequence
  Description of Artificial Sequence: Synthetic peptide
  MOD_RES (4)..(4): phosphorylated serine
RMYSPYNHRFFRKNLLRLTG

SEQ ID NO: 4384 - protein, 20 aa, Artificial Sequence
  Description of Artificial Sequence: Synthetic peptide
  MOD_RES (4)..(4): phosphorylated serine
RMYSYPRQKFFRKNLLRLTG

SEQ ID NO: 4385 - protein, 25 aa, Artificial Sequence
  Description of Artificial Sequence: Synthetic peptide
  MOD_RES (12)..(12): phosphorylated serine
RMYVTTSTRTYSLGFFRKNLLRLTG

SEQ ID NO: 4386 - protein, 25 aa, Artificial Sequence
  Description of Artificial Sequence: Synthetic peptide
  MOD_RES (12)..(12): phosphorylated serine
RMYVTTSTRTYSLKFFRKNLLRLTG

SEQ ID NO: 4387 - protein, 25 aa, Artificial Sequence
  Description of Artificial Sequence: Synthetic peptide
  MOD_RES (12)..(12): phosphorylated serine
RMYVTTSTRTYSLYFFRKNLLRLTG

SEQ ID NO: 4388 - protein, 20 aa, Artificial Sequence
  Description of Artificial Sequence: Synthetic peptide
  MOD_RES (4)..(4): phosphorylated serine
RNLSSPFIFFFRKNLLRLTG

SEQ ID NO: 4389 - protein, 20 aa, Artificial Sequence
  Description of Artificial Sequence: Synthetic peptide
  MOD_RES (6)..(6): phosphorylated serine
RPAFFSPSLFFRKNLLRLTG

SEQ ID NO: 4390 - protein, 20 aa, Artificial Sequence
  Description of Artificial Sequence: Synthetic peptide
  MOD_RES (5)..(5): phosphorylated serine
RPAKSMDSFFFRKNLLRLTG

SEQ ID NO: 4391 - protein, 20 aa, Artificial Sequence
  Description of Artificial Sequence: Synthetic peptide
  MOD_RES (5)..(5): phosphorylated serine
RPAKSMDSLFFRKNLLRLTG

SEQ ID NO: 4392 - protein, 20 aa, Artificial Sequence
  Description of Artificial Sequence: Synthetic peptide
  MOD_RES (5)..(5): phosphorylated serine
RPAKSMDSMFFRKNLLRLTG

SEQ ID NO: 4393 - protein, 19 aa, Artificial Sequence
  Description of Artificial Sequence: Synthetic peptide
  MOD_RES (5)..(5): phosphorylated serine
RPAKSMDVFFRKNLLRLTG

SEQ ID NO: 4394 - protein, 20 aa, Artificial Sequence
  Description of Artificial Sequence: Synthetic peptide
  MOD_RES (4)..(4): phosphorylated serine
RPASAGAMFFFRKNLLRLTG

SEQ ID NO: 4395 - protein, 20 aa, Artificial Sequence
  Description of Artificial Sequence: Synthetic peptide
  MOD_RES (4)..(4): phosphorylated serine
  MOD_RES (8)..(8): oxidized methionine
RPASAGAMLFFRKNLLRLTG

SEQ ID NO: 4396 - protein, 20 aa, Artificial Sequence
  Description of Artificial Sequence: Synthetic peptide
  MOD_RES (4)..(4): phosphorylated serine
RPASAGAMLFFRKNLLRLTG

SEQ ID NO: 4397 - protein, 20 aa, Artificial Sequence
  Description of Artificial Sequence: Synthetic peptide
  MOD_RES (4)..(4): phosphorylated serine
RPASAGAMMFFRKNLLRLTG

SEQ ID NO: 4398 - protein, 20 aa, Artificial Sequence
  Description of Artificial Sequence: Synthetic peptide
  MOD_RES (4)..(4): phosphorylated serine
RPASAGAMVFFRKNLLRLTG

SEQ ID NO: 4399 - protein, 22 aa, Artificial Sequence
  Description of Artificial Sequence: Synthetic peptide
  MOD_RES (4)..(4): phosphorylated serine
RPASARAQPGFFFRKNLLRLTG

SEQ ID NO: 4400 - protein, 22 aa, Artificial Sequence
  Description of Artificial Sequence: Synthetic peptide
  MOD_RES (4)..(4): phosphorylated serine
RPASARAQPGLFFRKNLLRLTG

SEQ ID NO: 4401 - protein, 22 aa, Artificial Sequence
  Description of Artificial Sequence: Synthetic peptide
  MOD_RES (4)..(4): phosphorylated serine
RPASARAQPGMFFRKNLLRLTG

SEQ ID NO: 4402 - protein, 22 aa, Artificial Sequence
  Description of Artificial Sequence: Synthetic peptide
  MOD_RES (4)..(4): phosphorylated serine
RPASARAQPGVFFRKNLLRLTG

SEQ ID NO: 4403 - protein, 22 aa, Artificial Sequence
  Description of Artificial Sequence: Synthetic peptide
  MOD_RES (4)..(4): phosphorylated serine
RPASEARAPGLFFRKNLLRLTG

SEQ ID NO: 4404 - protein, 20 aa, Artificial Sequence
  Description of Artificial Sequence: Synthetic peptide
  MOD_RES (4)..(4): phosphorylated serine
RPASPAAKFFFRKNLLRLTG

SEQ ID NO: 4405 - protein, 20 aa, Artificial Sequence
  Description of Artificial Sequence: Synthetic peptide
  MOD_RES (4)..(4): phosphorylated serine
RPASPAAKLFFRKNLLRLTG

SEQ ID NO: 4406 - protein, 20 aa, Artificial Sequence
  Description of Artificial Sequence: Synthetic peptide
  MOD_RES (4)..(4): phosphorylated serine
RPASPAAKMFFRKNLLRLTG

SEQ ID NO: 4407 - protein, 20 aa, Artificial Sequence
  Description of Artificial Sequence: Synthetic peptide
  MOD_RES (4)..(4): phosphorylated serine
RPASPAAKVFFRKNLLRLTG

SEQ ID NO: 4408 - protein, 20 aa, Artificial Sequence
  Description of Artificial Sequence: Synthetic peptide
  MOD_RES (4)..(4): phosphorylated serine
RPASPEPELFFRKNLLRLTG

SEQ ID NO: 4409 - protein, 20 aa, Artificial Sequence
  Description of Artificial Sequence: Synthetic peptide
  MOD_RES (4)..(4): phosphorylated serine
RPASPGPSLFFRKNLLRLTG

SEQ ID NO: 4410 - protein, 21 aa, Artificial Sequence
  Description of Artificial Sequence: Synthetic peptide
  MOD_RES (4)..(4): phosphorylated serine
RPASPKRAKIFFRKNLLRLTG

SEQ ID NO: 4411 - protein, 21 aa, Artificial Sequence
  Description of Artificial Sequence: Synthetic peptide
  MOD_RES (4)..(4): phosphorylated serine
RPASPKRAKLFFRKNLLRLTG

SEQ ID NO: 4412 - protein, 21 aa, Artificial Sequence
  Description of Artificial Sequence: Synthetic peptide
  MOD_RES (4)..(4): phosphorylated serine
  MOD_RES (10)..(10): Any amino acid
RPASPKRAKXFFRKNLLRLTG

SEQ ID NO: 4413 - protein, 21 aa, Artificial Sequence
  Description of Artificial Sequence: Synthetic peptide
  MOD_RES (4)..(4): phosphorylated serine
RPASPKRAQIFFRKNLLRLTG

SEQ ID NO: 4414 - protein, 21 aa, Artificial Sequence
  Description of Artificial Sequence: Synthetic peptide
  MOD_RES (4)..(4): phosphorylated serine
RPASPKRAQLFFRKNLLRLTG

SEQ ID NO: 4415 - protein, 21 aa, Artificial Sequence
  Description of Artificial Sequence: Synthetic peptide
  MOD_RES (4)..(4): phosphorylated serine
  MOD_RES (10)..(10): Any amino acid
RPASPKRAQXFFRKNLLRLTG

SEQ ID NO: 4416 - protein, 21 aa, Artificial Sequence
  Description of Artificial Sequence: Synthetic peptide
  MOD_RES (4)..(4): phosphorylated serine
RPASPQRAKIFFRKNLLRLTG

SEQ ID NO: 4417 - protein, 21 aa, Artificial Sequence
  Description of Artificial Sequence: Synthetic peptide
  MOD_RES (4)..(4): phosphorylated serine
RPASPQRAKLFFRKNLLRLTG

SEQ ID NO: 4418 - protein, 21 aa, Artificial Sequence
  Description of Artificial Sequence: Synthetic peptide
  MOD_RES (4)..(4): phosphorylated serine
  MOD_RES (10)..(10): Any amino acid
RPASPQRAKXFFRKNLLRLTG

SEQ ID NO: 4419 - protein, 21 aa, Artificial Sequence
  Description of Artificial Sequence: Synthetic peptide
  MOD_RES (4)..(4): phosphorylated serine
RPASPQRAQIFFRKNLLRLTG

SEQ ID NO: 4420 - protein, 21 aa, Artificial Sequence
  Description of Artificial Sequence: Synthetic peptide
  MOD_RES (4)..(4): phosphorylated serine
RPASPQRAQLFFRKNLLRLTG

SEQ ID NO: 4421 - protein, 21 aa, Artificial Sequence
  Description of Artificial Sequence: Synthetic peptide
  MOD_RES (4)..(4): phosphorylated serine
  MOD_RES (10)..(10): Any amino acid
RPASPQRAQXFFRKNLLRLTG

SEQ ID NO: 4422 - protein, 20 aa, Artificial Sequence
  Description of Artificial Sequence: Synthetic peptide
  MOD_RES (4)..(4): phosphorylated serine
RPASPSLQLFFRKNLLRLTG

SEQ ID NO: 4423 - protein, 21 aa, Artificial Sequence
  Description of Artificial Sequence: Synthetic peptide
  MOD_RES (4)..(4): phosphorylated serine
RPASPSLQLLFFRKNLLRLTG

SEQ ID NO: 4424 - protein, 30 aa, Artificial Sequence
  Description of Artificial Sequence: Synthetic polypeptide
  MOD_RES (4)..(4): phosphorylated serine
  MOD_RES (6)..(6): phosphorylated threonine
RPASPTAIRRIGSVTSRQTFFRKNLLRLTG

SEQ ID NO: 4425 - protein, 20 aa, Artificial Sequence
  Description of Artificial Sequence: Synthetic peptide
  MOD_RES (4)..(4): phosphorylated serine
RPASRFEVLFFRKNLLRLTG

SEQ ID NO: 4426 - protein, 22 aa, Artificial Sequence
  Description of Artificial Sequence: Synthetic peptide
  MOD_RES (4)..(4): phosphorylated serine
RPASYKKKSMLFFRKNLLRLTG

SEQ ID NO: 4427 - protein, 21 aa, Artificial Sequence
  Description of Artificial Sequence: Synthetic peptide
  MOD_RES (4)..(4): phosphorylated threonine
RPATGGPGVAFFRKNLLRLTG

SEQ ID NO: 4428 - protein, 21 aa, Artificial Sequence
  Description of Artificial Sequence: Synthetic peptide
  MOD_RES (4)..(4): phosphorylated threonine
RPATGGPGVFFFRKNLLRLTG

SEQ ID NO: 4429 - protein, 21 aa, Artificial Sequence
  Description of Artificial Sequence: Synthetic peptide
  MOD_RES (4)..(4): phosphorylated threonine
RPATGGPGVLFFRKNLLRLTG

SEQ ID NO: 4430 - protein, 21 aa, Artificial Sequence
  Description of Artificial Sequence: Synthetic peptide
  MOD_RES (4)..(4): phosphorylated threonine
RPATGGPGVMFFRKNLLRLTG

SEQ ID NO: 4431 - protein, 21 aa, Artificial Sequence
  Description of Artificial Sequence: Synthetic peptide
  MOD_RES (4)..(4): phosphorylated threonine
RPATGGPGVVFFRKNLLRLTG

SEQ ID NO: 4432 - protein, 20 aa, Artificial Sequence
  Description of Artificial Sequence: Synthetic peptide
  MOD_RES (4)..(4): phosphorylated threonine
RPATPTSQFFFRKNLLRLTG

SEQ ID NO: 4433 - protein, 20 aa, Artificial Sequence
  Description of Artificial Sequence: Synthetic peptide
  MOD_RES (4)..(4): phosphorylated threonine
RPATPTSQLFFRKNLLRLTG

SEQ ID NO: 4434 - protein, 20 aa, Artificial Sequence
  Description of Artificial Sequence: Synthetic peptide
  MOD_RES (4)..(4): phosphorylated threonine
RPATPTSQMFFRKNLLRLTG

SEQ ID NO: 4435 - protein, 20 aa, Artificial Sequence
  Description of Artificial Sequence: Synthetic peptide
  MOD_RES (4)..(4): phosphorylated threonine
RPATPTSQVFFRKNLLRLTG

SEQ ID NO: 4436 - protein, 20 aa, Artificial Sequence
  Description of Artificial Sequence: Synthetic peptide
  MOD_RES (4)..(4): phosphorylated serine
RPDSAHKMLFFRKNLLRLTG

SEQ ID NO: 4437 - protein, 21 aa, Artificial Sequence
  Description of Artificial Sequence: Synthetic peptide
  MOD_RES (4)..(4): phosphorylated serine
RPDSPTRPTLFFRKNLLRLTG

SEQ ID NO: 4438 - protein, 22 aa, Artificial Sequence
  Description of Artificial Sequence: Synthetic peptide
  MOD_RES (4)..(4): phosphorylated serine
RPDSRLGKTEFFFRKNLLRLTG

SEQ ID NO: 4439 - protein, 22 aa, Artificial Sequence
  Description of Artificial Sequence: Synthetic peptide
  MOD_RES (4)..(4): phosphorylated serine
RPDSRLGKTELFFRKNLLRLTG

SEQ ID NO: 4440 - protein, 22 aa, Artificial Sequence
  Description of Artificial Sequence: Synthetic peptide
  MOD_RES (4)..(4): phosphorylated serine
RPDSRLGKTEMFFRKNLLRLTG

SEQ ID NO: 4441 - protein, 22 aa, Artificial Sequence
  Description of Artificial Sequence: Synthetic peptide
  MOD_RES (4)..(4): phosphorylated serine
RPDSRLGKTEVFFRKNLLRLTG

SEQ ID NO: 4442 - protein, 21 aa, Artificial Sequence
  Description of Artificial Sequence: Synthetic peptide
  MOD_RES (9)..(9): phosphorylated serine
RPDVAKRLSLFFRKNLLRLTG

SEQ ID NO: 4443 - protein, 21 aa, Artificial Sequence
  Description of Artificial Sequence: Synthetic peptide
  MOD_RES (4)..(4): phosphorylated serine
RPESDSGLKFFFRKNLLRLTG

SEQ ID NO: 4444 - protein, 21 aa, Artificial Sequence
  Description of Artificial Sequence: Synthetic peptide
  MOD_RES (4)..(4): phosphorylated serine
RPESDSGLKLFFRKNLLRLTG

SEQ ID NO: 4445 - protein, 21 aa, Artificial Sequence
  Description of Artificial Sequence: Synthetic peptide
  MOD_RES (4)..(4): phosphorylated serine
RPESDSGLKMFFRKNLLRLTG

SEQ ID NO: 4446 - protein, 21 aa, Artificial Sequence
  Description of Artificial Sequence: Synthetic peptide
  MOD_RES (4)..(4): phosphorylated serine
RPESDSGLKVFFRKNLLRLTG

SEQ ID NO: 4447 - protein, 20 aa, Artificial Sequence
  Description of Artificial Sequence: Synthetic peptide
  MOD_RES (4)..(4): phosphorylated serine
RPESKDRKFFFRKNLLRLTG

SEQ ID NO: 4448 - protein, 20 aa, Artificial Sequence
  Description of Artificial Sequence: Synthetic peptide
  MOD_RES (4)..(4): phosphorylated serine
RPESKDRKLFFRKNLLRLTG

SEQ ID NO: 4449 - protein, 20 aa, Artificial Sequence
  Description of Artificial Sequence: Synthetic peptide
  MOD_RES (4)..(4): phosphorylated serine
RPESKDRKMFFRKNLLRLTG

SEQ ID NO: 4450 - protein, 20 aa, Artificial Sequence
  Description of Artificial Sequence: Synthetic peptide
  MOD_RES (4)..(4): phosphorylated serine
RPESKDRKVFFRKNLLRLTG

SEQ ID NO: 4451 - protein, 20 aa, Artificial Sequence
  Description of Artificial Sequence: Synthetic peptide
  MOD_RES (6)..(6): phosphorylated serine
RPFARSHSFFFRKNLLRLTG

SEQ ID NO: 4452 - protein, 20 aa, Artificial Sequence
  Description of Artificial Sequence: Synthetic peptide
  MOD_RES (8)..(8): phosphorylated serine
RPFARSHSFFFRKNLLRLTG

SEQ ID NO: 4453 - protein, 22 aa, Artificial Sequence
  Description of Artificial Sequence: Synthetic peptide
  MOD_RES (10)..(10): phosphorylated serine
RPFHGISTVSLFFRKNLLRLTG

SEQ ID NO: 4454 - protein, 20 aa, Artificial Sequence
  Description of Artificial Sequence: Synthetic peptide
  MOD_RES (4)..(4): phosphorylated serine
RPFSPREAFFFRKNLLRLTG

SEQ ID NO: 4455 - protein, 20 aa, Artificial Sequence
  Description of Artificial Sequence: Synthetic peptide
  MOD_RES (4)..(4): phosphorylated serine
RPFSPREALFFRKNLLRLTG

SEQ ID NO: 4456 - protein, 20 aa, Artificial Sequence
  Description of Artificial Sequence: Synthetic peptide
  MOD_RES (4)..(4): phosphorylated serine
RPFSPREAMFFRKNLLRLTG

SEQ ID NO: 4457 - protein, 20 aa, Artificial Sequence
  Description of Artificial Sequence: Synthetic peptide
  MOD_RES (4)..(4): phosphorylated serine
RPFSPREAVFFRKNLLRLTG

SEQ ID NO: 4458 - protein, 20 aa, Artificial Sequence
  Description of Artificial Sequence: Synthetic peptide
  MOD_RES (4)..(4): phosphorylated serine
RPGSLERKFFFRKNLLRLTG

SEQ ID NO: 4459 - protein, 20 aa, Artificial Sequence
  Description of Artificial Sequence: Synthetic peptide
  MOD_RES (4)..(4): phosphorylated serine
RPGSLERKLFFRKNLLRLTG

SEQ ID NO: 4460 - protein, 20 aa, Artificial Sequence
  Description of Artificial Sequence: Synthetic peptide
  MOD_RES (4)..(4): phosphorylated serine
RPGSLERKMFFRKNLLRLTG

SEQ ID NO: 4461 - protein, 20 aa, Artificial Sequence
  Description of Artificial Sequence: Synthetic peptide
  MOD_RES (4)..(4): phosphorylated serine
RPGSLERKVFFRKNLLRLTG

SEQ ID NO: 4462 - protein, 20 aa, Artificial Sequence
  Description of Artificial Sequence: Synthetic peptide
  MOD_RES (4)..(4): phosphorylated serine
RPGSRQAGLFFRKNLLRLTG

SEQ ID NO: 4463 - protein, 20 aa, Artificial Sequence
  Description of Artificial Sequence: Synthetic peptide
  MOD_RES (4)..(4): phosphorylated serine
RPGSRQAGLFFRKNLLRLTG

SEQ ID NO: 4464 - protein, 20 aa, Artificial Sequence
  Description of Artificial Sequence: Synthetic peptide
  MOD_RES (4)..(4): phosphorylated serine
RPHSPEKAFFFRKNLLRLTG

SEQ ID NO: 4465 - protein, 20 aa, Artificial Sequence
  Description of Artificial Sequence: Synthetic peptide
  MOD_RES (4)..(4): phosphorylated serine
RPHSPEKALFFRKNLLRLTG

SEQ ID NO: 4466 - protein, 20 aa, Artificial Sequence
  Description of Artificial Sequence: Synthetic peptide
  MOD_RES (4)..(4): phosphorylated serine
RPHSPEKAMFFRKNLLRLTG

SEQ ID NO: 4467 - protein, 20 aa, Artificial Sequence
  Description of Artificial Sequence: Synthetic peptide
  MOD_RES (4)..(4): phosphorylated serine
RPHSPEKAVFFRKNLLRLTG

SEQ ID NO: 4468 - protein, 21 aa, Artificial Sequence
  Description of Artificial Sequence: Synthetic peptide
  MOD_RES (4)..(4): phosphorylated threonine
RPHTPTGIYMFFRKNLLRLTG

SEQ ID NO: 4469 - protein, 22 aa, Artificial Sequence
  Description of Artificial Sequence: Synthetic peptide
  MOD_RES (4)..(4): phosphorylated threonine
RPHTPTPGIYMFFRKNLLRLTG

SEQ ID NO: 4470 - protein, 20 aa, Artificial Sequence
  Description of Artificial Sequence: Synthetic peptide
  MOD_RES (4)..(4): phosphorylated serine
RPISPGLSFFFRKNLLRLTG

SEQ ID NO: 4471 - protein, 20 aa, Artificial Sequence
  Description of Artificial Sequence: Synthetic peptide
  MOD_RES (4)..(4): phosphorylated serine
RPISPGLSLFFRKNLLRLTG

SEQ ID NO: 4472 - protein, 20 aa, Artificial Sequence
  Description of Artificial Sequence: Synthetic peptide
  MOD_RES (4)..(4): phosphorylated serine
RPISPGLSMFFRKNLLRLTG

SEQ ID NO: 4473 - protein, 20 aa, Artificial Sequence
  Description of Artificial Sequence: Synthetic peptide
  MOD_RES (4)..(4): phosphorylated serine
RPISPGLSVFFRKNLLRLTG

SEQ ID NO: 4474 - protein, 20 aa, Artificial Sequence
  Description of Artificial Sequence: Synthetic peptide
  MOD_RES (4)..(4): phosphorylated serine
RPISPGLSYFFRKNLLRLTG

SEQ ID NO: 4475 - protein, 20 aa, Artificial Sequence
  Description of Artificial Sequence: Synthetic peptide
  MOD_RES (4)..(4): phosphorylated serine
RPISPPHTYFFRKNLLRLTG

SEQ ID NO: 4476 - protein, 21 aa, Artificial Sequence
  Description of Artificial Sequence: Synthetic peptide
  MOD_RES (4)..(4): phosphorylated serine
RPISPRIGALFFRKNLLRLTG

SEQ ID NO: 4477 - protein, 21 aa, Artificial Sequence
  Description of Artificial Sequence: Synthetic peptide
  MOD_RES (4)..(4): phosphorylated threonine
RPITPPRNSAFFRKNLLRLTG

SEQ ID NO: 4478 - protein, 21 aa, Artificial Sequence
  Description of Artificial Sequence: Synthetic peptide
  MOD_RES (4)..(4): phosphorylated threonine
RPITPPRNSFFFRKNLLRLTG

SEQ ID NO: 4479 - protein, 21 aa, Artificial Sequence
  Description of Artificial Sequence: Synthetic peptide
  MOD_RES (4)..(4): phosphorylated threonine
RPITPPRNSLFFRKNLLRLTG

SEQ ID NO: 4480 - protein, 21 aa, Artificial Sequence
  Description of Artificial Sequence: Synthetic peptide
  MOD_RES (4)..(4): phosphorylated threonine
RPITPPRNSMFFRKNLLRLTG

SEQ ID NO: 4481 - protein, 21 aa, Artificial Sequence
  Description of Artificial Sequence: Synthetic peptide
  MOD_RES (4)..(4): phosphorylated threonine
RPITPPRNSVFFRKNLLRLTG

SEQ ID NO: 4482 - protein, 20 aa, Artificial Sequence
  Description of Artificial Sequence: Synthetic peptide
  MOD_RES (6)..(6): phosphorylated serine
RPKLSSPAFFFRKNLLRLTG

SEQ ID NO: 4483 - protein, 20 aa, Artificial Sequence
  Description of Artificial Sequence: Synthetic peptide
  MOD_RES (6)..(6): phosphorylated serine
RPKLSSPALFFRKNLLRLTG

SEQ ID NO: 4484 - protein, 20 aa, Artificial Sequence
  Description of Artificial Sequence: Synthetic peptide
  MOD_RES (6)..(6): phosphorylated serine
RPKLSSPAMFFRKNLLRLTG

SEQ ID NO: 4485 - protein, 20 aa, Artificial Sequence
  Description of Artificial Sequence: Synthetic peptide
  MOD_RES (6)..(6): phosphorylated serine
RPKLSSPAVFFRKNLLRLTG

SEQ ID NO: 4486 - protein, 20 aa, Artificial Sequence
  Description of Artificial Sequence: Synthetic peptide
  MOD_RES (7)..(7): phosphorylated serine
RPKPSSSPFFFRKNLLRLTG

SEQ ID NO: 4487 - protein, 20 aa, Artificial Sequence
  Description of Artificial Sequence: Synthetic peptide
  MOD_RES (7)..(7): phosphorylated serine
RPKPSSSPLFFRKNLLRLTG

SEQ ID NO: 4488 - protein, 20 aa, Artificial Sequence
  Description of Artificial Sequence: Synthetic peptide
  MOD_RES (7)..(7): phosphorylated serine
RPKPSSSPMFFRKNLLRLTG

SEQ ID NO: 4489 - protein, 20 aa, Artificial Sequence
  Description of Artificial Sequence: Synthetic peptide
  MOD_RES (7)..(7): phosphorylated serine
RPKPSSSPVFFRKNLLRLTG

SEQ ID NO: 4490 - protein, 20 aa, Artificial Sequence
  Description of Artificial Sequence: Synthetic peptide
  MOD_RES (4)..(4): phosphorylated serine
RPKSNIVLFFFRKNLLRLTG

SEQ ID NO: 4491 - protein, 20 aa, Artificial Sequence
  Description of Artificial Sequence: Synthetic peptide
  MOD_RES (4)..(4): phosphorylated serine
RPKSNIVLLFFRKNLLRLTG

SEQ ID NO: 4492 - protein, 20 aa, Artificial Sequence
  Description of Artificial Sequence: Synthetic peptide
  MOD_RES (4)..(4): phosphorylated serine
RPKSNIVLMFFRKNLLRLTG

SEQ ID NO: 4493 - protein, 20 aa, Artificial Sequence
  Description of Artificial Sequence: Synthetic peptide
  MOD_RES (4)..(4): phosphorylated serine
RPKSNIVLVFFRKNLLRLTG

SEQ ID NO: 4494 - protein, 20 aa, Artificial Sequence
  Description of Artificial Sequence: Synthetic peptide
  MOD_RES (4)..(4): phosphorylated serine
  MOD_RES (9)..(9): oxidized methionine
RPKSPLSKMFFRKNLLRLTG

SEQ ID NO: 4495 - protein, 20 aa, Artificial Sequence
  Description of Artificial Sequence: Synthetic peptide
  MOD_RES (4)..(4): phosphorylated serine
RPKSPLSKMFFRKNLLRLTG

SEQ ID NO: 4496 - protein, 20 aa, Artificial Sequence
  Description of Artificial Sequence: Synthetic peptide
  MOD_RES (4)..(4): phosphorylated serine
RPKSQVAEFFFRKNLLRLTG

SEQ ID NO: 4497 - protein, 20 aa, Artificial Sequence
  Description of Artificial Sequence: Synthetic peptide
  MOD_RES (4)..(4): phosphorylated serine
RPKSQVAELFFRKNLLRLTG

SEQ ID NO: 4498 - protein, 20 aa, Artificial Sequence
  Description of Artificial Sequence: Synthetic peptide
  MOD_RES (4)..(4): phosphorylated serine
RPKSQVAEMFFRKNLLRLTG

SEQ ID NO: 4499 - protein, 20 aa, Artificial Sequence
  Description of Artificial Sequence: Synthetic peptide
  MOD_RES (4)..(4): phosphorylated serine
RPKSQVAEVFFRKNLLRLTG

SEQ ID NO: 4500 - protein, 21 aa, Artificial Sequence
  Description of Artificial Sequence: Synthetic peptide
  MOD_RES (4)..(4): phosphorylated serine
RPKSVDFDSLFFRKNLLRLTG

SEQ ID NO: 4501 - protein, 20 aa, Artificial Sequence
  Description of Artificial Sequence: Synthetic peptide
  MOD_RES (4)..(4): phosphorylated threonine
RPKTPPVVIFFRKNLLRLTG

SEQ ID NO: 4502 - protein, 20 aa, Artificial Sequence
  Description of Artificial Sequence: Synthetic peptide
  MOD_RES (4)..(4): phosphorylated serine
RPLSLLLALFFRKNLLRLTG

SEQ ID NO: 4503 - protein, 20 aa, Artificial Sequence
  Description of Artificial Sequence: Synthetic peptide
  MOD_RES (4)..(4): phosphorylated serine
RPLSPGGAFFFRKNLLRLTG

SEQ ID NO: 4504 - protein, 20 aa, Artificial Sequence
  Description of Artificial Sequence: Synthetic peptide
  MOD_RES (4)..(4): phosphorylated serine
RPLSPGGALFFRKNLLRLTG

SEQ ID NO: 4505 - protein, 20 aa, Artificial Sequence
  Description of Artificial Sequence: Synthetic peptide
  MOD_RES (4)..(4): phosphorylated serine
RPLSPGGAMFFRKNLLRLTG

SEQ ID NO: 4506 - protein, 20 aa, Artificial Sequence
  Description of Artificial Sequence: Synthetic peptide
  MOD_RES (4)..(4): phosphorylated serine
RPLSPGGAVFFRKNLLRLTG

SEQ ID NO: 4507 - protein, 19 aa, Artificial Sequence
  Description of Artificial Sequence: Synthetic peptide
  MOD_RES (4)..(4): phosphorylated serine
RPLSPLLFFFRKNLLRLTG

SEQ ID NO: 4508 - protein, 19 aa, Artificial Sequence
  Description of Artificial Sequence: Synthetic peptide
  MOD_RES (4)..(4): phosphorylated serine
RPLSPLLLFFRKNLLRLTG

SEQ ID NO: 4509 - protein, 19 aa, Artificial Sequence
  Description of Artificial Sequence: Synthetic peptide
  MOD_RES (4)..(4): phosphorylated serine
RPLSPLLMFFRKNLLRLTG

SEQ ID NO: 4510 - protein, 19 aa, Artificial Sequence
  Description of Artificial Sequence: Synthetic peptide
  MOD_RES (4)..(4): phosphorylated serine
RPLSPLLVFFRKNLLRLTG

SEQ ID NO: 4511 - protein, 20 aa, Artificial Sequence
  Description of Artificial Sequence: Synthetic peptide
  MOD_RES (4)..(4): phosphorylated serine
RPLSVVYVLFFRKNLLRLTG

SEQ ID NO: 4512 - protein, 20 aa, Artificial Sequence
  Description of Artificial Sequence: Synthetic peptide
  MOD_RES (4)..(4): phosphorylated serine
RPMSESPHMFFRKNLLRLTG

SEQ ID NO: 4513 - protein, 21 aa, Artificial Sequence
  Description of Artificial Sequence: Synthetic peptide
  MOD_RES (4)..(4): phosphorylated serine
RPNSPSPTAFFFRKNLLRLTG

SEQ ID NO: 4514 - protein, 21 aa, Artificial Sequence
  Description of Artificial Sequence: Synthetic peptide
  MOD_RES (4)..(4): phosphorylated serine
RPNSPSPTALFFRKNLLRLTG

SEQ ID NO: 4515 - protein, 21 aa, Artificial Sequence
  Description of Artificial Sequence: Synthetic peptide
  MOD_RES (4)..(4): phosphorylated serine
RPNSPSPTAMFFRKNLLRLTG

SEQ ID NO: 4516 - protein, 21 aa, Artificial Sequence
  Description of Artificial Sequence: Synthetic peptide
  MOD_RES (4)..(4): phosphorylated serine
RPNSPSPTAVFFRKNLLRLTG

SEQ ID NO: 4517 - protein, 21 aa, Artificial Sequence
  Description of Artificial Sequence: Synthetic peptide
RPPIGTQSSLFFRKNLLRLTG

SEQ ID NO: 4518 - protein, 21 aa, Artificial Sequence
  Description of Artificial Sequence: Synthetic peptide
  MOD_RES (8)..(8): phosphorylated threonine
RPPPPPDTPFFFRKNLLRLTG

SEQ ID NO: 4519 - protein, 21 aa, Artificial Sequence
  Description of Artificial Sequence: Synthetic peptide
  MOD_RES (8)..(8): phosphorylated threonine
RPPPPPDTPLFFRKNLLRLTG

SEQ ID NO: 4520 - protein, 21 aa, Artificial Sequence
  Description of Artificial Sequence: Synthetic peptide
  MOD_RES (8)..(8): phosphorylated threonine
RPPPPPDTPMFFRKNLLRLTG

SEQ ID NO: 4521 - protein, 21 aa, Artificial Sequence
  Description of Artificial Sequence: Synthetic peptide
  MOD_RES (8)..(8): phosphorylated threonine
RPPPPPDTPPFFRKNLLRLTG

SEQ ID NO: 4522 - protein, 21 aa, Artificial Sequence
  Description of Artificial Sequence: Synthetic peptide
  MOD_RES (8)..(8): phosphorylated threonine
RPPPPPDTPVFFRKNLLRLTG

SEQ ID NO: 4523 - protein, 20 aa, Artificial Sequence
  Description of Artificial Sequence: Synthetic peptide
  MOD_RES (4)..(4): phosphorylated serine
RPPSPGPVFFFRKNLLRLTG

SEQ ID NO: 4524 - protein, 20 aa, Artificial Sequence
  Description of Artificial Sequence: Synthetic peptide
  MOD_RES (4)..(4): phosphorylated serine
RPPSPGPVLFFRKNLLRLTG

SEQ ID NO: 4525 - protein, 20 aa, Artificial Sequence
  Description of Artificial Sequence: Synthetic peptide
  MOD_RES (4)..(4): phosphorylated serine
RPPSPGPVMFFRKNLLRLTG

SEQ ID NO: 4526 - protein, 20 aa, Artificial Sequence
  Description of Artificial Sequence: Synthetic peptide
  MOD_RES (4)..(4): phosphorylated serine
RPPSPGPVVFFRKNLLRLTG

SEQ ID NO: 4527 - protein, 20 aa, Artificial Sequence
  Description of Artificial Sequence: Synthetic peptide
  MOD_RES (4)..(4): phosphorylated serine
RPPSPSSRFFFRKNLLRLTG

SEQ ID NO: 4528 - protein, 20 aa, Artificial Sequence
  Description of Artificial Sequence: Synthetic peptide
  MOD_RES (4)..(4): phosphorylated serine
RPPSPSSRLFFRKNLLRLTG

SEQ ID NO: 4529 - protein, 20 aa, Artificial Sequence
  Description of Artificial Sequence: Synthetic peptide
  MOD_RES (4)..(4): phosphorylated serine
RPPSPSSRMFFRKNLLRLTG

SEQ ID NO: 4530 - protein, 20 aa, Artificial Sequence
  Description of Artificial Sequence: Synthetic peptide
  MOD_RES (4)..(4): phosphorylated serine
RPPSPSSRVFFRKNLLRLTG

SEQ ID NO: 4531 - protein, 21 aa, Artificial Sequence
  Description of Artificial Sequence: Synthetic peptide
  MOD_RES (4)..(4): phosphorylated serine
RPPSSEFLDFFFRKNLLRLTG

SEQ ID NO: 4532 - protein, 21 aa, Artificial Sequence
  Description of Artificial Sequence: Synthetic peptide
  MOD_RES (4)..(4): phosphorylated serine
RPPSSEFLDLFFRKNLLRLTG

SEQ ID NO: 4533 - protein, 21 aa, Artificial Sequence
  Description of Artificial Sequence: Synthetic peptide
  MOD_RES (4)..(4): phosphorylated serine
RPPSSEFLDMFFRKNLLRLTG

SEQ ID NO: 4534 - protein, 21 aa, Artificial Sequence
  Description of Artificial Sequence: Synthetic peptide
  MOD_RES (4)..(4): phosphorylated serine
RPPSSEFLDVFFRKNLLRLTG

SEQ ID NO: 4535 - protein, 20 aa, Artificial Sequence
  Description of Artificial Sequence: Synthetic peptide
  MOD_RES (7)..(7): phosphorylated serine
RPQKTQSIIFFRKNLLRLTG

SEQ ID NO: 4536 - protein, 21 aa, Artificial Sequence
  Description of Artificial Sequence: Synthetic peptide
  MOD_RES (6)..(6): phosphorylated threonine
RPQRATSNVFFFRKNLLRLTG

SEQ ID NO: 4537 - protein, 21 aa, Artificial Sequence
  Description of Artificial Sequence: Synthetic peptide
  MOD_RES (7)..(7): phosphorylated serine
RPQRATSNVFFFRKNLLRLTG

SEQ ID NO: 4538 - protein, 21 aa, Artificial Sequence
  Description of Artificial Sequence: Synthetic peptide
  MOD_RES (6)..(6): phosphorylated threonine
RPQRATSNVLFFRKNLLRLTG

SEQ ID NO: 4539 - protein, 21 aa, Artificial Sequence
  Description of Artificial Sequence: Synthetic peptide
  MOD_RES (7)..(7): phosphorylated serine
RPQRATSNVLFFRKNLLRLTG

SEQ ID NO: 4540 - protein, 21 aa, Artificial Sequence
  Description of Artificial Sequence: Synthetic peptide
  MOD_RES (6)..(6): phosphorylated threonine
RPQRATSNVMFFRKNLLRLTG

SEQ ID NO: 4541 - protein, 21 aa, Artificial Sequence
  Description of Artificial Sequence: Synthetic peptide
  MOD_RES (7)..(7): phosphorylated serine
RPQRATSNVMFFRKNLLRLTG

SEQ ID NO: 4542 - protein, 21 aa, Artificial Sequence
  Description of Artificial Sequence: Synthetic peptide
  MOD_RES (6)..(6): phosphorylated threonine
RPQRATSNVVFFRKNLLRLTG

SEQ ID NO: 4543 - protein, 21 aa, Artificial Sequence
  Description of Artificial Sequence: Synthetic peptide
  MOD_RES (7)..(7): phosphorylated serine
RPQRATSNVVFFRKNLLRLTG

SEQ ID NO: 4544 - protein, 23 aa, Artificial Sequence
  Description of Artificial Sequence: Synthetic peptide
  MISC_FEATURE (4)..(7): at least one serine residue in the amino acid sequence SLSS is phosphorylated
RPRSLSSPTVTLFFRKNLLRLTG

SEQ ID NO: 4545 - protein, 23 aa, Artificial Sequence
  Description of Artificial Sequence: Synthetic peptide
  MISC_FEATURE (4)..(7): at least one serine residue in the amino acid sequence SLSS is phosphorylated
RPRSLSSPTVTVFFRKNLLRLTG

SEQ ID NO: 4546 - protein, 19 aa, Artificial Sequence
  Description of Artificial Sequence: Synthetic peptide
  MOD_RES (6)..(6): phosphorylated threonine
RPRAATVVFFRKNLLRLTG

SEQ ID NO: 4547 - protein, 20 aa, Artificial Sequence
  Description of Artificial Sequence: Synthetic peptide
  MOD_RES (6)..(6): phosphorylated threonine
RPRAATVVAFFRKNLLRLTG

SEQ ID NO: 4548 - protein, 18 aa, Artificial Sequence
  Description of Artificial Sequence: Synthetic peptide
  MOD_RES (6)..(6): phosphorylated threonine
RPRAATWFFRKNLLRLTG

SEQ ID NO: 4549 - protein, 19 aa, Artificial Sequence
  Description of Artificial Sequence: Synthetic peptide
  MOD_RES (6)..(6): phosphorylated threonine
RPRAATWAFFRKNLLRLTG

SEQ ID NO: 4550 - protein, 22 aa, Artificial Sequence
  Description of Artificial Sequence: Synthetic peptide
  MOD_RES (6)..(6): phosphorylated serine
RPRANSGGVDFFFRKNLLRLTG

SEQ ID NO: 4551 - protein, 22 aa, Artificial Sequence
  Description of Artificial Sequence: Synthetic peptide
  MOD_RES (6)..(6): phosphorylated serine
RPRANSGGVDLFFRKNLLRLTG

SEQ ID NO: 4552 - protein, 22 aa, Artificial Sequence
  Description of Artificial Sequence: Synthetic peptide
  MOD_RES (6)..(6): phosphorylated serine
RPRANSGGVDMFFRKNLLRLTG

SEQ ID NO: 4553 - protein, 22 aa, Artificial Sequence
  Description of Artificial Sequence: Synthetic peptide
  MOD_RES (6)..(6): phosphorylated serine
RPRANSGGVDVFFRKNLLRLTG

SEQ ID NO: 4554 - protein, 21 aa, Artificial Sequence
  Description of Artificial Sequence: Synthetic peptide
  MOD_RES (6)..(6): phosphorylated serine
RPRARSVDALFFRKNLLRLTG

SEQ ID NO: 4555 - protein, 21 aa, Artificial Sequence
  Description of Artificial Sequence: Synthetic peptide
  MOD_RES (5)..(5): phosphorylated threonine
RPRDTRRISLFFRKNLLRLTG

SEQ ID NO: 4556 - protein, 20 aa, Artificial Sequence
  Description of Artificial Sequence: Synthetic peptide
  MOD_RES (5)..(5): phosphorylated serine
RPRGSESLLFFRKNLLRLTG

SEQ ID NO: 4557 - protein, 20 aa, Artificial Sequence
  Description of Artificial Sequence: Synthetic peptide
  MOD_RES (5)..(5): phosphorylated serine
RPRGSQSLFFFRKNLLRLTG

SEQ ID NO: 4558 - protein, 20 aa, Artificial Sequence
  Description of Artificial Sequence: Synthetic peptide
  MOD_RES (5)..(5): phosphorylated serine
RPRGSQSLLFFRKNLLRLTG

SEQ ID NO: 4559 - protein, 20 aa, Artificial Sequence
  Description of Artificial Sequence: Synthetic peptide
  MOD_RES (5)..(5): phosphorylated serine
RPRGSQSLMFFRKNLLRLTG

SEQ ID NO: 4560 - protein, 20 aa, Artificial Sequence
  Description of Artificial Sequence: Synthetic peptide
  MOD_RES (5)..(5): phosphorylated serine
RPRGSQSLVFFRKNLLRLTG

SEQ ID NO: 4561 - protein, 21 aa, Artificial Sequence
  Description of Artificial Sequence: Synthetic peptide
  MOD_RES (6)..(6): phosphorylated serine
RPRIPSPIGFFFRKNLLRLTG

SEQ ID NO: 4562 - protein, 23 aa, Artificial Sequence
  Description of Artificial Sequence: Synthetic peptide
  MOD_RES (6)..(6): phosphorylated serine
RPRLSSTNSSRFFFRKNLLRLTG

SEQ ID NO: 4563 - protein, 21 aa, Artificial Sequence
  Description of Artificial Sequence: Synthetic peptide
  MOD_RES (6)..(6): phosphorylated serine
RPRPASSPALFFRKNLLRLTG

SEQ ID NO: 4564 - protein, 21 aa, Artificial Sequence
  Description of Artificial Sequence: Synthetic peptide
  MOD_RES (6)..(6): phosphorylated serine
RPRPHSAPSFFFRKNLLRLTG

SEQ ID NO: 4565 - protein, 21 aa, Artificial Sequence
  Description of Artificial Sequence: Synthetic peptide
  MOD_RES (6)..(6): phosphorylated serine
RPRPHSAPSLFFRKNLLRLTG

SEQ ID NO: 4566 - protein, 21 aa, Artificial Sequence
  Description of Artificial Sequence: Synthetic peptide
  MOD_RES (6)..(6): phosphorylated serine
RPRPHSAPSMFFRKNLLRLTG

SEQ ID NO: 4567 - protein, 21 aa, Artificial Sequence
  Description of Artificial Sequence: Synthetic peptide
  MOD_RES (6)..(6): phosphorylated serine
RPRPHSAPSVFFRKNLLRLTG

SEQ ID NO: 4568 - protein, 22 aa, Artificial Sequence
  Description of Artificial Sequence: Synthetic peptide
  MOD_RES (6)..(6): phosphorylated serine
RPRPSSAHVGLFFRKNLLRLTG

SEQ ID NO: 4569 - protein, 19 aa, Artificial Sequence
  Description of Artificial Sequence: Synthetic peptide
  MOD_RES (5)..(5): phosphorylated serine
RPRPSSVLFFRKNLLRLTG

SEQ ID NO: 4570 - protein, 22 aa, Artificial Sequence
  Description of Artificial Sequence: Synthetic peptide
  MOD_RES (5)..(5): phosphorylated serine
RPRPSSVLRTLFFRKNLLRLTG

SEQ ID NO: 4571 - protein, 21 aa, Artificial Sequence
  Description of Artificial Sequence: Synthetic peptide
  MOD_RES (6)..(6): phosphorylated serine
RPRPVSPSSFFFRKNLLRLTG

SEQ ID NO: 4572 - protein, 21 aa, Artificial Sequence
  Description of Artificial Sequence: Synthetic peptide
  MOD_RES (6)..(6): phosphorylated serine
RPRPVSPSSLFFRKNLLRLTG

SEQ ID NO: 4573 - protein, 22 aa, Artificial Sequence
  Description of Artificial Sequence: Synthetic peptide
  MOD_RES (6)..(6): phosphorylated serine
RPRPVSPSSLLFFRKNLLRLTG

SEQ ID NO: 4574 - protein, 21 aa, Artificial Sequence
  Description of Artificial Sequence: Synthetic peptide
  MOD_RES (6)..(6): phosphorylated serine
RPRPVSPSSMFFRKNLLRLTG

SEQ ID NO: 4575 - protein, 21 aa, Artificial Sequence
  Description of Artificial Sequence: Synthetic peptide
  MOD_RES (6)..(6): phosphorylated serine
RPRPVSPSSVFFRKNLLRLTG

SEQ ID NO: 4576 - protein, 20 aa, Artificial Sequence
  Description of Artificial Sequence: Synthetic peptide
  MOD_RES (5)..(5): phosphorylated serine
RPRRSSTQFFFRKNLLRLTG

SEQ ID NO: 4577 - protein, 20 aa, Artificial Sequence
  Description of Artificial Sequence: Synthetic peptide
  MOD_RES (5)..(5): phosphorylated serine
RPRRSSTQLFFRKNLLRLTG

SEQ ID NO: 4578 - protein, 20 aa, Artificial Sequence
  Description of Artificial Sequence: Synthetic peptide
  MOD_RES (5)..(5): phosphorylated serine
RPRRSSTQMFFRKNLLRLTG

SEQ ID NO: 4579 - protein, 20 aa, Artificial Sequence
  Description of Artificial Sequence: Synthetic peptide
  MOD_RES (5)..(5): phosphorylated serine
RPRRSSTQVFFRKNLLRLTG

SEQ ID NO: 4580 - protein, 20 aa, Artificial Sequence
  Description of Artificial Sequence: Synthetic peptide
  MOD_RES (4)..(4): phosphorylated serine
RPRSAVEQLFFRKNLLRLTG

SEQ ID NO: 4581 - protein, 19 aa, Artificial Sequence
  Description of Artificial Sequence: Synthetic peptide
  MOD_RES (4)..(4): phosphorylated serine
RPRSAVLFFFRKNLLRLTG

SEQ ID NO: 4582 - protein, 19 aa, Artificial Sequence
  Description of Artificial Sequence: Synthetic peptide
  MOD_RES (4)..(4): phosphorylated serine
RPRSAVLLFFRKNLLRLTG

SEQ ID NO: 4583 - protein, 19 aa, Artificial Sequence
  Description of Artificial Sequence: Synthetic peptide
  MOD_RES (4)..(4): phosphorylated serine
RPRSAVLMFFRKNLLRLTG

SEQ ID NO: 4584 - protein, 19 aa, Artificial Sequence
  Description of Artificial Sequence: Synthetic peptide
  MOD_RES (4)..(4): phosphorylated serine
RPRSAVLVFFRKNLLRLTG

SEQ ID NO: 4585 - protein, 22 aa, Artificial Sequence
  Description of Artificial Sequence: Synthetic peptide
  MOD_RES (6)..(6): phosphorylated serine
RPRSGSTGSSLFFRKNLLRLTG

SEQ ID NO: 4586 - protein, 21 aa, Artificial Sequence
  Description of Artificial Sequence: Synthetic peptide
  MOD_RES (4)..(4): phosphorylated serine
RPRSISVEEFFFRKNLLRLTG

SEQ ID NO: 4587 - protein, 21 aa, Artificial Sequence
  Description of Artificial Sequence: Synthetic peptide
  MOD_RES (4)..(4): phosphorylated serine
RPRSISVEELFFRKNLLRLTG

SEQ ID NO: 4588 - protein, 21 aa, Artificial Sequence
  Description of Artificial Sequence: Synthetic peptide
  MOD_RES (4)..(4): phosphorylated serine
RPRSISVEEMFFRKNLLRLTG

SEQ ID NO: 4589 - protein, 21 aa, Artificial Sequence
  Description of Artificial Sequence: Synthetic peptide
  MOD_RES (4)..(4): phosphorylated serine
RPRSISVEEVFFRKNLLRLTG

SEQ ID NO: 4590 - protein, 20 aa, Artificial Sequence
  Description of Artificial Sequence: Synthetic peptide
  MOD_RES (4)..(4): phosphorylated serine
RPRSLEVTFFFRKNLLRLTG

SEQ ID NO: 4591 - protein, 20 aa, Artificial Sequence
  Description of Artificial Sequence: Synthetic peptide
  MOD_RES (4)..(4): phosphorylated serine
RPRSLEVTIFFRKNLLRLTG

SEQ ID NO: 4592 - protein, 20 aa, Artificial Sequence
  Description of Artificial Sequence: Synthetic peptide
  MOD_RES (4)..(4): phosphorylated serine
RPRSLEVTLFFRKNLLRLTG

SEQ ID NO: 4593 - protein, 20 aa, Artificial Sequence
  Description of Artificial Sequence: Synthetic peptide
  MOD_RES (4)..(4): phosphorylated serine
RPRSLEVTMFFRKNLLRLTG

SEQ ID NO: 4594 - protein, 20 aa, Artificial Sequence
  Description of Artificial Sequence: Synthetic peptide
  MOD_RES (4)..(4): phosphorylated serine
RPRSLEVTVFFRKNLLRLTG

SEQ ID NO: 4595 - protein, 21 aa, Artificial Sequence
  Description of Artificial Sequence: Synthetic peptide
  MOD_RES (6)..(6): phosphorylated serine
RPRSLSSPTVFFRKNLLRLTG

SEQ ID NO: 4596 - protein, 23 aa, Artificial Sequence
  Description of Artificial Sequence: Synthetic peptide
  MOD_RES (6)..(6): phosphorylated serine
RPRSLSSPTVTFFFRKNLLRLTG

SEQ ID NO: 4597 - protein, 23 aa, Artificial Sequence
  Description of Artificial Sequence: Synthetic peptide
  MOD_RES (6)..(6): phosphorylated serine
RPRSLSSPTVTLFFRKNLLRLTG

SEQ ID NO: 4598 - protein, 23 aa, Artificial Sequence
  Description of Artificial Sequence: Synthetic peptide
  MOD_RES (6)..(6): phosphorylated serine
RPRSLSSPTVTMFFRKNLLRLTG

SEQ ID NO: 4599 - protein, 23 aa, Artificial Sequence
  Description of Artificial Sequence: Synthetic peptide
  MOD_RES (6)..(6): phosphorylated serine
RPRSLSSPTVTVFFRKNLLRLTG

SEQ ID NO: 4600 - protein, 20 aa, Artificial Sequence
  Description of Artificial Sequence: Synthetic peptide
  MOD_RES (4)..(4): phosphorylated serine
RPRSMTVSAFFRKNLLRLTG

SEQ ID NO: 4601 - protein, 20 aa, Artificial Sequence
  Description of Artificial Sequence: Synthetic peptide
  MOD_RES (4)..(4): phosphorylated serine
RPRSMVRSFFFRKNLLRLTG

SEQ ID NO: 4602 - protein, 20 aa, Artificial Sequence
  Description of Artificial Sequence: Synthetic peptide
  MOD_RES (4)..(4): phosphorylated serine
RPRSPAARFFFRKNLLRLTG

SEQ ID NO: 4603 - protein, 20 aa, Artificial Sequence
  Description of Artificial Sequence: Synthetic peptide
  MOD_RES (4)..(4): phosphorylated serine
RPRSPAARLFFRKNLLRLTG

SEQ ID NO: 4604 - protein, 20 aa, Artificial Sequence
  Description of Artificial Sequence: Synthetic peptide
  MOD_RES (4)..(4): phosphorylated serine
RPRSPAARMFFRKNLLRLTG

SEQ ID NO: 4605 - protein, 20 aa, Artificial Sequence
  Description of Artificial Sequence: Synthetic peptide
  MOD_RES (4)..(4): phosphorylated serine
RPRSPAARVFFRKNLLRLTG

SEQ ID NO: 4606 - protein, 22 aa, Artificial Sequence
  Description of Artificial Sequence: Synthetic peptide
  MOD_RES (4)..(4): phosphorylated serine
RPRSPGSNSKVFFRKNLLRLTG

SEQ ID NO: 4607 - protein, 21 aa, Artificial Sequence
  Description of Artificial Sequence: Synthetic peptide
  MOD_RES (4)..(4): phosphorylated serine
RPRSPNMQDLFFRKNLLRLTG

SEQ ID NO: 4608 - protein, 20 aa, Artificial Sequence
  Description of Artificial Sequence: Synthetic peptide
  MOD_RES (4)..(4): phosphorylated serine
RPRSPPGGPFFRKNLLRLTG

SEQ ID NO: 4609 - protein, 21 aa, Artificial Sequence
  Description of Artificial Sequence: Synthetic peptide
  MOD_RES (4)..(4): phosphorylated serine
RPRSPPPRAFFFRKNLLRLTG

SEQ ID NO: 4610 - protein, 21 aa, Artificial Sequence
  Description of Artificial Sequence: Synthetic peptide
  MOD_RES (4)..(4): phosphorylated serine
RPRSPPPRALFFRKNLLRLTG

SEQ ID NO: 4611 - protein, 21 aa, Artificial Sequence
  Description of Artificial Sequence: Synthetic peptide
  MOD_RES (4)..(4): phosphorylated serine
RPRSPPPRAMFFRKNLLRLTG

SEQ ID NO: 4612 - protein, 21 aa, Artificial Sequence
  Description of Artificial Sequence: Synthetic peptide
  MOD_RES (4)..(4): phosphorylated serine
RPRSPPPRAPFFRKNLLRLTG

SEQ ID NO: 4613 - protein, 21 aa, Artificial Sequence
  Description of Artificial Sequence: Synthetic peptide
  MOD_RES (4)..(4): phosphorylated serine
RPRSPPPRAVFFRKNLLRLTG

SEQ ID NO: 4614 - protein, 20 aa, Artificial Sequence
  Description of Artificial Sequence: Synthetic peptide
  MOD_RES (4)..(4): phosphorylated serine
RPRSPPSSPFFRKNLLRLTG

SEQ ID NO: 4615 - protein, 21 aa, Artificial Sequence
  Description of Artificial Sequence: Synthetic peptide
  MOD_RES (4)..(4): phosphorylated serine
RPRSPRENSFFFRKNLLRLTG

SEQ ID NO: 4616 - protein, 21 aa, Artificial Sequence
  Description of Artificial Sequence: Synthetic peptide
  MOD_RES (4)..(4): phosphorylated serine
RPRSPRENSIFFRKNLLRLTG

SEQ ID NO: 4617 - protein, 21 aa, Artificial Sequence
  Description of Artificial Sequence: Synthetic peptide
  MOD_RES (4)..(4): phosphorylated serine
RPRSPRENSLFFRKNLLRLTG

SEQ ID NO: 4618 - protein, 21 aa, Artificial Sequence
  Description of Artificial Sequence: Synthetic peptide
  MOD_RES (4)..(4): phosphorylated serine
RPRSPRENSMFFRKNLLRLTG

SEQ ID NO: 4619 - protein, 21 aa, Artificial Sequence
  Description of Artificial Sequence: Synthetic peptide
  MOD_RES (4)..(4): phosphorylated serine
RPRSPRENSVFFRKNLLRLTG

SEQ ID NO: 4620 - protein, 20 aa, Artificial Sequence
  Description of Artificial Sequence: Synthetic peptide
  MOD_RES (4)..(4): phosphorylated serine
RPRSPRPPPFFRKNLLRLTG

SEQ ID NO: 4621 - protein, 21 aa, Artificial Sequence
  Description of Artificial Sequence: Synthetic peptide
  MOD_RES (4)..(4): phosphorylated serine
RPRSPRQNLIFFRKNLLRLTG

SEQ ID NO: 4622 - protein, 21 aa, Artificial Sequence
  Description of Artificial Sequence: Synthetic peptide
  MOD_RES (4)..(4): phosphorylated serine
RPRSPRQNSFFFRKNLLRLTG

SEQ ID NO: 4623 - protein, 21 aa, Artificial Sequence
  Description of Artificial Sequence: Synthetic peptide
  MOD_RES (4)..(4): phosphorylated serine
RPRSPRQNSIFFRKNLLRLTG

SEQ ID NO: 4624 - protein, 21 aa, Artificial Sequence
  Description of Artificial Sequence: Synthetic peptide
  MOD_RES (4)..(4): phosphorylated serine
RPRSPRQNSMFFRKNLLRLTG

SEQ ID NO: 4625 - protein, 21 aa, Artificial Sequence
  Description of Artificial Sequence: Synthetic peptide
  MOD_RES (4)..(4): phosphorylated serine
RPRSPRQNSVFFRKNLLRLTG

SEQ ID NO: 4626 - protein, 20 aa, Artificial Sequence
  Description of Artificial Sequence: Synthetic peptide
  MOD_RES (4)..(4): phosphorylated serine
RPRSPSPIFFFRKNLLRLTG

SEQ ID NO: 4627 - protein, 20 aa, Artificial Sequence
  Description of Artificial Sequence: Synthetic peptide
  MOD_RES (4)..(4): phosphorylated serine
RPRSPSPILFFRKNLLRLTG

SEQ ID NO: 4628 - protein, 20 aa, Artificial Sequence
  Description of Artificial Sequence: Synthetic peptide
  MOD_RES (4)..(4): phosphorylated serine
RPRSPSPIMFFRKNLLRLTG

SEQ ID NO: 4629 - protein, 20 aa, Artificial Sequence
  Description of Artificial Sequence: Synthetic peptide
  MOD_RES (4)..(4): phosphorylated serine
RPRSPSPISFFRKNLLRLTG

SEQ ID NO: 4630 - protein, 20 aa, Artificial Sequence
  Description of Artificial Sequence: Synthetic peptide
  MOD_RES (6)..(6): phosphorylated serine
RPRSPSPISFFRKNLLRLTG

SEQ ID NO: 4631 - protein, 20 aa, Artificial Sequence
  Description of Artificial Sequence: Synthetic peptide
  MOD_RES (4)..(4): phosphorylated serine
RPRSPSPIVFFRKNLLRLTG

SEQ ID NO: 4632 - protein, 19 aa, Artificial Sequence
  Description of Artificial Sequence: Synthetic peptide
  MOD_RES (4)..(4): phosphorylated serine
RPRSPTGFFFRKNLLRLTG

SEQ ID NO: 4633 - protein, 19 aa, Artificial Sequence
  Description of Artificial Sequence: Synthetic peptide
  MOD_RES (4)..(4): phosphorylated serine
RPRSPTGLFFRKNLLRLTG

SEQ ID NO: 4634 - protein, 19 aa, Artificial Sequence
  Description of Artificial Sequence: Synthetic peptide
  MOD_RES (4)..(4): phosphorylated serine
RPRSPTGMFFRKNLLRLTG

SEQ ID NO: 4635 - protein, 19 aa, Artificial Sequence
  Description of Artificial Sequence: Synthetic peptide
  MOD_RES (4)..(4): phosphorylated serine
RPRSPTGPFFRKNLLRLTG

SEQ ID NO: 4636 - protein, 23 aa, Artificial Sequence
  Description of Artificial Sequence: Synthetic peptide
  MOD_RES (4)..(4): phosphorylated serine
  MOD_RES (9)..(9): phosphorylated serine
RPRSPTGPSNSFFFRKNLLRLTG

SEQ ID NO: 4637 - protein, 23 aa, Artificial Sequence
  Description of Artificial Sequence: Synthetic peptide
  MOD_RES (4)..(4): phosphorylated serine
RPRSPTGPSNSFFFRKNLLRLTG

SEQ ID NO: 4638 - protein, 24 aa, Artificial Sequence
  Description of Artificial Sequence: Synthetic peptide
  MOD_RES (4)..(4): phosphorylated serine
RPRSPTGPSNSFLFFRKNLLRLTG

SEQ ID NO: 4639 - protein, 23 aa, Artificial Sequence
  Description of Artificial Sequence: Synthetic peptide
  MOD_RES (4)..(4): phosphorylated serine
  MOD_RES (9)..(9): phosphorylated serine
RPRSPTGPSNSLFFRKNLLRLTG

SEQ ID NO: 4640 - protein, 23 aa, Artificial Sequence
  Description of Artificial Sequence: Synthetic peptide
  MOD_RES (4)..(4): phosphorylated serine
  MOD_RES (9)..(9): phosphorylated serine
RPRSPTGPSNSMFFRKNLLRLTG

SEQ ID NO: 4641 - protein, 23 aa, Artificial Sequence
  Description of Artificial Sequence: Synthetic peptide
  MOD_RES (4)..(4): phosphorylated serine
  MOD_RES (9)..(9): phosphorylated serine
RPRSPTGPSNSVFFRKNLLRLTG

SEQ ID NO: 4642 - protein, 19 aa, Artificial Sequence
  Description of Artificial Sequence: Synthetic peptide
  MOD_RES (4)..(4): phosphorylated serine
RPRSPTGVFFRKNLLRLTG

SEQ ID NO: 4643 - protein, 20 aa, Artificial Sequence
  Description of Artificial Sequence: Synthetic peptide
  MOD_RES (4)..(4): phosphorylated serine
RPRSPTRSFFFRKNLLRLTG

SEQ ID NO: 4644 - protein, 20 aa, Artificial Sequence
  Description of Artificial Sequence: Synthetic peptide
  MOD_RES (4)..(4): phosphorylated serine
RPRSPTRSLFFRKNLLRLTG

SEQ ID NO: 4645 - protein, 20 aa, Artificial Sequence
  Description of Artificial Sequence: Synthetic peptide
  MOD_RES (4)..(4): phosphorylated serine
RPRSPTRSMFFRKNLLRLTG

SEQ ID NO: 4646 - protein, 20 aa, Artificial Sequence
  Description of Artificial Sequence: Synthetic peptide
  MOD_RES (4)..(4): phosphorylated serine
RPRSPTRSVFFRKNLLRLTG

SEQ ID NO: 4647 - protein, 20 aa, Artificial Sequence
  Description of Artificial Sequence: Synthetic peptide
  MOD_RES (4)..(4): phosphorylated serine
RPRSPWGKLFFRKNLLRLTG

SEQ ID NO: 4648 - protein, 21 aa, Artificial Sequence
  Description of Artificial Sequence: Synthetic peptide
  MOD_RES (4)..(4): phosphorylated serine
RPRSQYNTKLFFRKNLLRLTG

SEQ ID NO: 4649 - protein, 23 aa, Artificial Sequence
  Description of Artificial Sequence: Synthetic peptide
  MOD_RES (6)..(6): phosphorylated serine
RPRSTSQSIVSLFFRKNLLRLTG

SEQ ID NO: 4650 - protein, 20 aa, Artificial Sequence
  Description of Artificial Sequence: Synthetic peptide
  MOD_RES (4)..(4): phosphorylated threonine
RPRTPLRSLFFRKNLLRLTG

SEQ ID NO: 4651 - protein, 20 aa, Artificial Sequence
  Description of Artificial Sequence: Synthetic peptide
  MOD_RES (8)..(8): phosphorylated serine
RPSGRRESFFFRKNLLRLTG

SEQ ID NO: 4652 - protein, 20 aa, Artificial Sequence
  Description of Artificial Sequence: Synthetic peptide
  MOD_RES (8)..(8): phosphorylated serine
RPSGRRESLFFRKNLLRLTG

SEQ ID NO: 4653 - protein, 20 aa, Artificial Sequence
  Description of Artificial Sequence: Synthetic peptide
  MOD_RES (8)..(8): phosphorylated serine
RPSGRRESMFFRKNLLRLTG

SEQ ID NO: 4654 - protein, 20 aa, Artificial Sequence
  Description of Artificial Sequence: Synthetic peptide
  MOD_RES (8)..(8): phosphorylated serine
RPSGRRESVFFRKNLLRLTG

SEQ ID NO: 4655 - protein, 18 aa, Artificial Sequence
  Description of Artificial Sequence: Synthetic peptide
  MOD_RES (3)..(3): phosphorylated serine
RPSNPQLFFRKNLLRLTG

SEQ ID NO: 4656 - protein, 20 aa, Artificial Sequence
  Description of Artificial Sequence: Synthetic peptide
  MOD_RES (6)..(6): phosphorylated serine
RPSRSSPGFFFRKNLLRLTG

SEQ ID NO: 4657 - protein, 20 aa, Artificial Sequence
  Description of Artificial Sequence: Synthetic peptide
  MOD_RES (6)..(6): phosphorylated serine
RPSRSSPGLFFRKNLLRLTG

SEQ ID NO: 4658 - protein, 20 aa, Artificial Sequence
  Description of Artificial Sequence: Synthetic peptide
  MOD_RES (6)..(6): phosphorylated serine
RPSRSSPGMFFRKNLLRLTG

SEQ ID NO: 4659 - protein, 20 aa, Artificial Sequence
  Description of Artificial Sequence: Synthetic peptide
  MOD_RES (6)..(6): phosphorylated serine
RPSRSSPGVFFRKNLLRLTG

SEQ ID NO: 4660 - protein, 20 aa, Artificial Sequence
  Description of Artificial Sequence: Synthetic peptide
  MOD_RES (4)..(4): phosphorylated serine
RPSSGFYELFFRKNLLRLTG

SEQ ID NO: 4661 - protein, 23 aa, Artificial Sequence
  Description of Artificial Sequence: Synthetic peptide
  MOD_RES (4)..(4): phosphorylated serine
RPSSLDAEIDSFFFRKNLLRLTG

SEQ ID NO: 4662 - protein, 23 aa, Artificial Sequence
  Description of Artificial Sequence: Synthetic peptide
  MOD_RES (4)..(4): phosphorylated serine
RPSSLDAEIDSLFFRKNLLRLTG

SEQ ID NO: 4663 - protein, 23 aa, Artificial Sequence
  Description of Artificial Sequence: Synthetic peptide
  MOD_RES (4)..(4): phosphorylated serine
RPSSLDAEIDSMFFRKNLLRLTG

SEQ ID NO: 4664 - protein, 23 aa, Artificial Sequence
  Description of Artificial Sequence: Synthetic peptide
  MOD_RES (4)..(4): phosphorylated serine
RPSSLDAEIDSVFFRKNLLRLTG

SEQ ID NO: 4665 - protein, 19 aa, Artificial Sequence
  Description of Artificial Sequence: Synthetic peptide
  MOD_RES (4)..(4): phosphorylated serine
RPSSLPDFFFRKNLLRLTG

SEQ ID NO: 4666 - protein, 19 aa, Artificial Sequence
  Description of Artificial Sequence: Synthetic peptide
  MOD_RES (4)..(4): phosphorylated serine
RPSSLPDLFFRKNLLRLTG

SEQ ID NO: 4667 - protein, 19 aa, Artificial Sequence
  Description of Artificial Sequence: Synthetic peptide
  MOD_RES (4)..(4): phosphorylated serine
RPSSLPDMFFRKNLLRLTG

SEQ ID NO: 4668 - protein, 19 aa, Artificial Sequence
  Description of Artificial Sequence: Synthetic peptide
  MOD_RES (4)..(4): phosphorylated serine
RPSSLPDVFFRKNLLRLTG

SEQ ID NO: 4669 - protein, 20 aa, Artificial Sequence
  Description of Artificial Sequence: Synthetic peptide
  MOD_RES (3)..(3): phosphorylated serine
RPSSPALYFFFRKNLLRLTG

SEQ ID NO: 4670 - protein, 20 aa, Artificial Sequence
  Description of Artificial Sequence: Synthetic peptide
  MOD_RES (4)..(4): phosphorylated serine
RPSSPALYFFFRKNLLRLTG

SEQ ID NO: 4671 - protein, 20 aa, Artificial Sequence
  Description of Artificial Sequence: Synthetic peptide
  MOD_RES (3)..(3): phosphorylated serine
RPSSPALYLFFRKNLLRLTG

SEQ ID NO: 4672 - protein, 20 aa, Artificial Sequence
  Description of Artificial Sequence: Synthetic peptide
  MOD_RES (3)..(3): phosphorylated serine
RPSSPALYMFFRKNLLRLTG

SEQ ID NO: 4673 - protein, 20 aa, Artificial Sequence
  Description of Artificial Sequence: Synthetic peptide
  MOD_RES (3)..(3): phosphorylated serine
RPSSPALYVFFRKNLLRLTG

SEQ ID NO: 4674 - protein, 22 aa, Artificial Sequence
  Description of Artificial Sequence: Synthetic peptide
  MOD_RES (4)..(4): phosphorylated threonine
RPSTPKSDSEFFFRKNLLRLTG

SEQ ID NO: 4675 - protein, 22 aa, Artificial Sequence
  Description of Artificial Sequence: Synthetic peptide
  MOD_RES (4)..(4): phosphorylated threonine
RPSTPKSDSELFFRKNLLRLTG

SEQ ID NO: 4676 - protein, 22 aa, Artificial Sequence
  Description of Artificial Sequence: Synthetic peptide
  MOD_RES (4)..(4): phosphorylated threonine
RPSTPKSDSEMFFRKNLLRLTG

SEQ ID NO: 4677 - protein, 22 aa, Artificial Sequence
  Description of Artificial Sequence: Synthetic peptide
  MOD_RES (4)..(4): phosphorylated threonine
RPSTPKSDSEVFFRKNLLRLTG

SEQ ID NO: 4678 - protein, 21 aa, Artificial Sequence
  Description of Artificial Sequence: Synthetic peptide
  MOD_RES (9)..(9): phosphorylated serine
RPTKIGRRSLFFRKNLLRLTG

SEQ ID NO: 4679 - protein, 20 aa, Artificial Sequence
  Description of Artificial Sequence: Synthetic peptide
  MOD_RES (4)..(4): phosphorylated serine
RPTSFADELFFRKNLLRLTG

SEQ ID NO: 4680 - protein, 20 aa, Artificial Sequence
  Description of Artificial Sequence: Synthetic peptide
  MOD_RES (4)..(4): phosphorylated serine
RPTSPIQIMFFRKNLLRLTG

SEQ ID NO: 4681 - protein, 20 aa, Artificial Sequence
  Description of Artificial Sequence: Synthetic peptide
  MOD_RES (4)..(4): phosphorylated serine
RPTSRLNRFFFRKNLLRLTG

SEQ ID NO: 4682 - protein, 20 aa, Artificial Sequence
  Description of Artificial Sequence: Synthetic peptide
  MOD_RES (4)..(4): phosphorylated serine
RPTSRLNRLFFRKNLLRLTG

SEQ ID NO: 4683 - protein, 20 aa, Artificial Sequence
  Description of Artificial Sequence: Synthetic peptide
  MOD_RES (4)..(4): phosphorylated serine
RPTSRLNRMFFRKNLLRLTG

SEQ ID NO: 4684 - protein, 20 aa, Artificial Sequence
  Description of Artificial Sequence: Synthetic peptide
  MOD_RES (4)..(4): phosphorylated serine
RPTSRLNRVFFRKNLLRLTG

SEQ ID NO: 4685 - protein, 20 aa, Artificial Sequence
  Description of Artificial Sequence: Synthetic peptide
  MOD_RES (4)..(4): phosphorylated serine
RPVSPFQEFFFRKNLLRLTG

SEQ ID NO: 4686 - protein, 20 aa, Artificial Sequence
  Description of Artificial Sequence: Synthetic peptide
  MOD_RES (4)..(4): phosphorylated serine
RPVSPFQELFFRKNLLRLTG

SEQ ID NO: 4687 - protein, 20 aa, Artificial Sequence
  Description of Artificial Sequence: Synthetic peptide
  MOD_RES (4)..(4): phosphorylated serine
RPVSPFQEMFFRKNLLRLTG

SEQ ID NO: 4688 - protein, 20 aa, Artificial Sequence
  Description of Artificial Sequence: Synthetic peptide
  MOD_RES (4)..(4): phosphorylated serine
RPVSPFQEVFFRKNLLRLTG

SEQ ID NO: 4689 - protein, 20 aa, Artificial Sequence
  Description of Artificial Sequence: Synthetic peptide
  MOD_RES (4)..(4): phosphorylated serine
RPVSPGKDFFFRKNLLRLTG

SEQ ID NO: 4690 - protein, 20 aa, Artificial Sequence
  Description of Artificial Sequence: Synthetic peptide
  MOD_RES (4)..(4): phosphorylated serine
RPVSPGKDIFFRKNLLRLTG

SEQ ID NO: 4691 - protein, 20 aa, Artificial Sequence
  Description of Artificial Sequence: Synthetic peptide
  MOD_RES (4)..(4): phosphorylated serine
RPVSPGKDLFFRKNLLRLTG

SEQ ID NO: 4692 - protein, 20 aa, Artificial Sequence
  Description of Artificial Sequence: Synthetic peptide
  MOD_RES (4)..(4): phosphorylated serine
RPVSPGKDMFFRKNLLRLTG

SEQ ID NO: 4693 - protein, 20 aa, Artificial Sequence
  Description of Artificial Sequence: Synthetic peptide
  MOD_RES (4)..(4): phosphorylated serine
RPVSPGKDVFFRKNLLRLTG

SEQ ID NO: 4694 - protein, 20 aa, Artificial Sequence
  Description of Artificial Sequence: Synthetic peptide
  MOD_RES (6)..(6): phosphorylated serine
RPVSPSSLLFFRKNLLRLTG

SEQ ID NO: 4695 - protein, 21 aa, Artificial Sequence
  Description of Artificial Sequence: Synthetic peptide
  MOD_RES (4)..(4): phosphorylated serine
RPVSTDFAQYFFRKNLLRLTG

SEQ ID NO: 4696 - protein, 20 aa, Artificial Sequence
  Description of Artificial Sequence: Synthetic peptide
  MOD_RES (4)..(4): phosphorylated threonine
RPVTPVSDFFFRKNLLRLTG

SEQ ID NO: 4697 - protein, 20 aa, Artificial Sequence
  Description of Artificial Sequence: Synthetic peptide
  MOD_RES (4)..(4): phosphorylated threonine
RPVTPVSDLFFRKNLLRLTG

SEQ ID NO: 4698 - protein, 20 aa, Artificial Sequence
  Description of Artificial Sequence: Synthetic peptide
  MOD_RES (4)..(4): phosphorylated threonine
RPVTPVSDMFFRKNLLRLTG

SEQ ID NO: 4699 - protein, 20 aa, Artificial Sequence
  Description of Artificial Sequence: Synthetic peptide
  MOD_RES (4)..(4): phosphorylated threonine
RPVTPVSDVFFRKNLLRLTG

SEQ ID NO: 4700 - protein, 20 aa, Artificial Sequence
  Description of Artificial Sequence: Synthetic peptide
  MOD_RES (4)..(4): phosphorylated serine
RPWSNSRGLFFRKNLLRLTG

SEQ ID NO: 4701 - protein, 20 aa, Artificial Sequence
  Description of Artificial Sequence: Synthetic peptide
  MOD_RES (4)..(4): phosphorylated serine
RPWSPAVSAFFRKNLLRLTG

SEQ ID NO: 4702 - protein, 20 aa, Artificial Sequence
  Description of Artificial Sequence: Synthetic peptide
  MOD_RES (4)..(4): phosphorylated serine
RPWSPAVSFFFRKNLLRLTG

SEQ ID NO: 4703 - protein, 20 aa, Artificial Sequence
  Description of Artificial Sequence: Synthetic peptide
  MOD_RES (4)..(4): phosphorylated serine
RPWSPAVSLFFRKNLLRLTG

SEQ ID NO: 4704 - protein, 20 aa, Artificial Sequence
  Description of Artificial Sequence: Synthetic peptide
  MOD_RES (4)..(4): phosphorylated serine
RPWSPAVSMFFRKNLLRLTG

SEQ ID NO: 4705 - protein, 20 aa, Artificial Sequence
  Description of Artificial Sequence: Synthetic peptide
  MOD_RES (4)..(4): phosphorylated serine
RPWSPAVSVFFRKNLLRLTG

SEQ ID NO: 4706 - protein, 21 aa, Artificial Sequence
  Description of Artificial Sequence: Synthetic peptide
  MOD_RES (4)..(4): phosphorylated serine
RPYSPPFFSFFFRKNLLRLTG

SEQ ID NO: 4707 - protein, 21 aa, Artificial Sequence
  Description of Artificial Sequence: Synthetic peptide
  MOD_RES (4)..(4): phosphorylated serine
RPYSPPFFSLFFRKNLLRLTG

SEQ ID NO: 4708 - protein, 21 aa, Artificial Sequence
  Description of Artificial Sequence: Synthetic peptide
  MOD_RES (4)..(4): phosphorylated serine
RPYSPPFFSMFFRKNLLRLTG

SEQ ID NO: 4709 - protein, 21 aa, Artificial Sequence
  Description of Artificial Sequence: Synthetic peptide
  MOD_RES (4)..(4): phosphorylated serine
RPYSPPFFSVFFRKNLLRLTG

SEQ ID NO: 4710 - protein, 20 aa, Artificial Sequence
  Description of Artificial Sequence: Synthetic peptide
  MOD_RES (6)..(6): phosphorylated serine
RPYSPSQALFFRKNLLRLTG

SEQ ID NO: 4711 - protein, 21 aa, Artificial Sequence
  Description of Artificial Sequence: Synthetic peptide
  MOD_RES (4)..(4): phosphorylated serine
RPYSPSQYALFFRKNLLRLTG

SEQ ID NO: 4712 - protein, 21 aa, Artificial Sequence
  Description of Artificial Sequence: Synthetic peptide
  MOD_RES (6)..(6): phosphorylated serine
RPYSPSQYALFFRKNLLRLTG

SEQ ID NO: 4713 - protein, 20 aa, Artificial Sequence
  Description of Artificial Sequence: Synthetic peptide
  MOD_RES (4)..(4): phosphorylated serine
RPYSQVNVLFFRKNLLRLTG

SEQ ID NO: 4714 - protein, 21 aa, Artificial Sequence
  Description of Artificial Sequence: Synthetic peptide
  MOD_RES (4)..(4): phosphorylated serine
RQASIELPSMFFRKNLLRLTG

SEQ ID NO: 4715 - protein, 23 aa, Artificial Sequence
  Description of Artificial Sequence: Synthetic peptide
  MOD_RES (4)..(4): phosphorylated serine
RQASIELPSMAVFFRKNLLRLTG

SEQ ID NO: 4716 - protein, 21 aa, Artificial Sequence
  Description of Artificial Sequence: Synthetic peptide
  MOD_RES (4)..(4): phosphorylated serine
RQASIELPSVFFRKNLLRLTG

SEQ ID NO: 4717 - protein, 20 aa, Artificial Sequence
  Description of Artificial Sequence: Synthetic peptide
  MOD_RES (4)..(4): phosphorylated serine
RQASLSISVFFRKNLLRLTG

SEQ ID NO: 4718 - protein, 20 aa, Artificial Sequence
  Description of Artificial Sequence: Synthetic peptide
  MOD_RES (4)..(4): phosphorylated serine
RQASPLVHKFFRKNLLRLTG

SEQ ID NO: 4719 - protein, 20 aa, Artificial Sequence
  Description of Artificial Sequence: Synthetic peptide
  MOD_RES (4)..(4): phosphorylated serine
RQASPLVHRFFRKNLLRLTG

SEQ ID NO: 4720 - protein, 20 aa, Artificial Sequence
  Description of Artificial Sequence: Synthetic peptide
  MOD_RES (4)..(4): phosphorylated serine
RQASPLVHYFFRKNLLRLTG

SEQ ID NO: 4721 - protein, 22 aa, Artificial Sequence
  Description of Artificial Sequence: Synthetic peptide
  MOD_RES (4)..(4): phosphorylated serine
RQDSTPGKVFLFFRKNLLRLTG

SEQ ID NO: 4722 - protein, 22 aa, Artificial Sequence
  Description of Artificial Sequence: Synthetic peptide
  MOD_RES (5)..(5): phosphorylated threonine
RQDSTPGKVFLFFRKNLLRLTG

SEQ ID NO: 4723 - protein, 22 aa, Artificial Sequence
  Description of Artificial Sequence: Synthetic peptide
  MOD_RES (4)..(4): phosphorylated serine
RQDSTPGKVFVFFRKNLLRLTG

SEQ ID NO: 4724 - protein, 20 aa, Artificial Sequence
  Description of Artificial Sequence: Synthetic peptide
  MOD_RES (4)..(4): phosphorylated serine
RQISFKAEVFFRKNLLRLTG

SEQ ID NO: 4725 - protein, 20 aa, Artificial Sequence
  Description of Artificial Sequence: Synthetic peptide
  MOD_RES (4)..(4): phosphorylated serine
RQISQDVKLFFRKNLLRLTG

SEQ ID NO: 4726 - protein, 20 aa, Artificial Sequence
  Description of Artificial Sequence: Synthetic peptide
  MOD_RES (4)..(4): phosphorylated serine
RQISQDVKVFFRKNLLRLTG

SEQ ID NO: 4727 - protein, 20 aa, Artificial Sequence
  Description of Artificial Sequence: Synthetic peptide
  MOD_RES (4)..(4): phosphorylated serine
RQKSPLFQFFFRKNLLRLTG

SEQ ID NO: 4728 - protein, 20 aa, Artificial Sequence
  Description of Artificial Sequence: Synthetic peptide
  MOD_RES (4)..(4): phosphorylated serine
RQLSALHRAFFRKNLLRLTG

SEQ ID NO: 4729 - protein, 23 aa, Artificial Sequence
  Description of Artificial Sequence: Synthetic peptide
  MOD_RES (4)..(4): phosphorylated serine
RQLSLEGSGLGVFFRKNLLRLTG

SEQ ID NO: 4730 - protein, 21 aa, Artificial Sequence
  Description of Artificial Sequence: Synthetic peptide
  MOD_RES (4)..(4): phosphorylated serine
RQLSSGVSEIFFRKNLLRLTG

SEQ ID NO: 4731 - protein, 21 aa, Artificial Sequence
  Description of Artificial Sequence: Synthetic peptide
  MOD_RES (4)..(4): phosphorylated serine
RQLSSGVSEVFFRKNLLRLTG

SEQ ID NO: 4732 - protein, 20 aa, Artificial Sequence
  Description of Artificial Sequence: Synthetic peptide
  MOD_RES (4)..(4): phosphorylated serine
RQSSSRFNLFFRKNLLRLTG

SEQ ID NO: 4733 - protein, 20 aa, Artificial Sequence
  Description of Artificial Sequence: Synthetic peptide
  MOD_RES (4)..(4): phosphorylated serine
RRASFAKSFFFRKNLLRLTG

SEQ ID NO: 4734 - protein, 20 aa, Artificial Sequence
  Description of Artificial Sequence: Synthetic peptide
  MOD_RES (4)..(4): phosphorylated serine
RRASFAKSKFFRKNLLRLTG

SEQ ID NO: 4735 - protein, 20 aa, Artificial Sequence
  Description of Artificial Sequence: Synthetic peptide
  MOD_RES (4)..(4): phosphorylated serine
RRASFAKSLFFRKNLLRLTG

SEQ ID NO: 4736 - protein, 20 aa, Artificial Sequence
  Description of Artificial Sequence: Synthetic peptide
  MOD_RES (4)..(4): phosphorylated serine
RRASFAKSMFFRKNLLRLTG

SEQ ID NO: 4737 - protein, 20 aa, Artificial Sequence
  Description of Artificial Sequence: Synthetic peptide
  MOD_RES (4)..(4): phosphorylated serine
RRASFAKSRFFRKNLLRLTG

SEQ ID NO: 4738 - protein, 20 aa, Artificial Sequence
  Description of Artificial Sequence: Synthetic peptide
  MOD_RES (4)..(4): phosphorylated serine
RRASIITKYFFRKNLLRLTG

SEQ ID NO: 4739 - protein, 21 aa, Artificial Sequence
  Description of Artificial Sequence: Synthetic peptide
  MOD_RES (4)..(4): phosphorylated serine
RRASLSEIGFFFRKNLLRLTG

SEQ ID NO: 4740 - protein, 21 aa, Artificial Sequence
  Description of Artificial Sequence: Synthetic peptide
  MOD_RES (4)..(4): phosphorylated serine
RRASLSEIGKFFRKNLLRLTG

SEQ ID NO: 4741 - protein, 21 aa, Artificial Sequence
  Description of Artificial Sequence: Synthetic peptide
  MOD_RES (4)..(4): phosphorylated serine
RRASLSEIGYFFRKNLLRLTG

SEQ ID NO: 4742 - protein, 20 aa, Artificial Sequence
  Description of Artificial Sequence: Synthetic peptide
  MOD_RES (4)..(4): phosphorylated serine
RRASQEANLFFRKNLLRLTG

SEQ ID NO: 4743 - protein, 20 aa, Artificial Sequence
  Description of Artificial Sequence: Synthetic peptide
  MOD_RES (5)..(5): phosphorylated serine
RRASSPFRFFFRKNLLRLTG

SEQ ID NO: 4744 - protein, 20 aa, Artificial Sequence
  Description of Artificial Sequence: Synthetic peptide
  MOD_RES (5)..(5): phosphorylated serine
RRASSPFRKFFRKNLLRLTG

SEQ ID NO: 4745 - protein, 20 aa, Artificial Sequence
  Description of Artificial Sequence: Synthetic peptide
  MOD_RES (5)..(5): phosphorylated serine
RRASSPFRLFFRKNLLRLTG

SEQ ID NO: 4746 - protein, 20 aa, Artificial Sequence
  Description of Artificial Sequence: Synthetic peptide
  MOD_RES (5)..(5): phosphorylated serine
RRASSPFRMFFRKNLLRLTG

SEQ ID NO: 4747 - protein, 20 aa, Artificial Sequence
  Description of Artificial Sequence: Synthetic peptide
  MOD_RES (5)..(5): phosphorylated serine
RRASSPFRRFFRKNLLRLTG

SEQ ID NO: 4748 - protein, 20 aa, Artificial Sequence
  Description of Artificial Sequence: Synthetic peptide
  MOD_RES (4)..(4): phosphorylated serine
RRASVFVKFFFRKNLLRLTG

SEQ ID NO: 4749 - protein, 20 aa, Artificial Sequence
  Description of Artificial Sequence: Synthetic peptide
  MOD_RES (4)..(4): phosphorylated serine
RRASVFVKKFFRKNLLRLTG

SEQ ID NO: 4750 - protein, 20 aa, Artificial Sequence
  Description of Artificial Sequence: Synthetic peptide
  MOD_RES (4)..(4): phosphorylated serine
RRASVFVKLFFRKNLLRLTG

SEQ ID NO: 4751 - protein, 20 aa, Artificial Sequence
  Description of Artificial Sequence: Synthetic peptide
  MOD_RES (4)..(4): phosphorylated serine
RRASVFVKMFFRKNLLRLTG

SEQ ID NO: 4752 - protein, 20 aa, Artificial Sequence
  Description of Artificial Sequence: Synthetic peptide
  MOD_RES (4)..(4): phosphorylated serine
RRASVFVKRFFRKNLLRLTG

SEQ ID NO: 4753 - protein, 20 aa, Artificial Sequence
  Description of Artificial Sequence: Synthetic peptide
  MOD_RES (4)..(4): phosphorylated serine
RRDSIVAEFFFRKNLLRLTG

SEQ ID NO: 4754 - protein, 20 aa, Artificial Sequence
  Description of Artificial Sequence: Synthetic peptide
  MOD_RES (4)..(4): phosphorylated serine
RRDSIVAEKFFRKNLLRLTG

SEQ ID NO: 4755 - protein, 20 aa, Artificial Sequence
  Description of Artificial Sequence: Synthetic peptide
  MOD_RES (4)..(4): phosphorylated serine
RRDSIVAELFFRKNLLRLTG

SEQ ID NO: 4756 - protein, 20 aa, Artificial Sequence
  Description of Artificial Sequence: Synthetic peptide
  MOD_RES (4)..(4): phosphorylated serine
RRDSIVAERFFRKNLLRLTG

SEQ ID NO: 4757 - protein, 20 aa, Artificial Sequence
  Description of Artificial Sequence: Synthetic peptide
  MOD_RES (4)..(4): phosphorylated serine
RRDSIVAEYFFRKNLLRLTG

SEQ ID NO: 4758 - protein, 21 aa, Artificial Sequence
  Description of Artificial Sequence: Synthetic peptide
  MOD_RES (4)..(4): phosphorylated serine
RRDSLQKPGLFFRKNLLRLTG

SEQ ID NO: 4759 - protein, 20 aa, Artificial Sequence
  Description of Artificial Sequence: Synthetic peptide
  MOD_RES (4)..(4): phosphorylated serine
RRFSFEVTLFFRKNLLRLTG

SEQ ID NO: 4760 - protein, 18 aa, Artificial Sequence
  Description of Artificial Sequence: Synthetic peptide
  MOD_RES (4)..(4): phosphorylated serine
RRFSFKFFFRKNLLRLTG

SEQ ID NO: 4761 - protein, 18 aa, Artificial Sequence
  Description of Artificial Sequence: Synthetic peptide
  MOD_RES (4)..(4): phosphorylated serine
RRFSFKKFFRKNLLRLTG

SEQ ID NO: 4762 - protein, 20 aa, Artificial Sequence
  Description of Artificial Sequence: Synthetic peptide
  MOD_RES (4)..(4): phosphorylated serine
RRFSFKKSFFFRKNLLRLTG

SEQ ID NO: 4763 - protein, 20 aa, Artificial Sequence
  Description of Artificial Sequence: Synthetic peptide
  MOD_RES (4)..(4): phosphorylated serine
RRFSFKKSKFFRKNLLRLTG

SEQ ID NO: 4764 - protein, 20 aa, Artificial Sequence
  Description of Artificial Sequence: Synthetic peptide
  MOD_RES (4)..(4): phosphorylated serine
RRFSFKKSLFFRKNLLRLTG

SEQ ID NO: 4765 - protein, 20 aa, Artificial Sequence
  Description of Artificial Sequence: Synthetic peptide
  MOD_RES (4)..(4): phosphorylated serine
RRFSFKKSMFFRKNLLRLTG

SEQ ID NO: 4766 - protein, 20 aa, Artificial Sequence
  Description of Artificial Sequence: Synthetic peptide
  MOD_RES (4)..(4): phosphorylated serine
RRFSFKKSRFFRKNLLRLTG

SEQ ID NO: 4767 - protein, 18 aa, Artificial Sequence
  Description of Artificial Sequence: Synthetic peptide
  MOD_RES (4)..(4): phosphorylated serine
RRFSFKLFFRKNLLRLTG

SEQ ID NO: 4768 - protein, 18 aa, Artificial Sequence
  Description of Artificial Sequence: Synthetic peptide
  MOD_RES (4)..(4): phosphorylated serine
RRFSFKMFFRKNLLRLTG

SEQ ID NO: 4769 - protein, 18 aa, Artificial Sequence
  Description of Artificial Sequence: Synthetic peptide
  MOD_RES (4)..(4): phosphorylated serine
RRFSFKRFFRKNLLRLTG

SEQ ID NO: 4770 - protein, 20 aa, Artificial Sequence
  Description of Artificial Sequence: Synthetic peptide
  MOD_RES (4)..(4): phosphorylated serine
RRFSGTAVYFFRKNLLRLTG

SEQ ID NO: 4771 - protein, 20 aa, Artificial Sequence
  Description of Artificial Sequence: Synthetic peptide
  MOD_RES (4)..(4): phosphorylated serine
RRFSGTVRFFFRKNLLRLTG

SEQ ID NO: 4772 - protein, 20 aa, Artificial Sequence
  Description of Artificial Sequence: Synthetic peptide
  MOD_RES (4)..(4): phosphorylated serine
RRFSGTVRKFFRKNLLRLTG

SEQ ID NO: 4773 - protein, 20 aa, Artificial Sequence
  Description of Artificial Sequence: Synthetic peptide
  MOD_RES (4)..(4): phosphorylated serine
RRFSGTVRLFFRKNLLRLTG

SEQ ID NO: 4774 - protein, 20 aa, Artificial Sequence
  Description of Artificial Sequence: Synthetic peptide
  MOD_RES (4)..(4): phosphorylated serine
RRFSGTVRMFFRKNLLRLTG

SEQ ID NO: 4775 - protein, 20 aa, Artificial Sequence
  Description of Artificial Sequence: Synthetic peptide
  MOD_RES (4)..(4): phosphorylated serine
RRFSGTVRRFFRKNLLRLTG

SEQ ID NO: 4776 - protein, 20 aa, Artificial Sequence
  Description of Artificial Sequence: Synthetic peptide
  MOD_RES (4)..(4): phosphorylated serine
RRFSIATLRFFRKNLLRLTG

SEQ ID NO: 4777 - protein, 20 aa, Artificial Sequence
  Description of Artificial Sequence: Synthetic peptide
  MOD_RES (4)..(4): phosphorylated serine
RRFSLTTLRFFRKNLLRLTG

SEQ ID NO: 4778 - protein, 22 aa, Artificial Sequence
  Description of Artificial Sequence: Synthetic peptide
  MOD_RES (4)..(4): phosphorylated serine
RRFSPDDKYSFFFRKNLLRLTG

SEQ ID NO: 4779 - protein, 22 aa, Artificial Sequence
  Description of Artificial Sequence: Synthetic peptide
  MOD_RES (4)..(4): phosphorylated serine
RRFSPDDKYSKFFRKNLLRLTG

SEQ ID NO: 4780 - protein, 22 aa, Artificial Sequence
  Description of Artificial Sequence: Synthetic peptide
  MOD_RES (4)..(4): phosphorylated serine
RRFSPDDKYSLFFRKNLLRLTG

SEQ ID NO: 4781 - protein, 22 aa, Artificial Sequence
  Description of Artificial Sequence: Synthetic peptide
  MOD_RES (4)..(4): phosphorylated serine
RRFSPDDKYSMFFRKNLLRLTG

SEQ ID NO: 4782 - protein, 20 aa, Artificial Sequence
  Description of Artificial Sequence: Synthetic peptide
  MOD_RES (4)..(4): phosphorylated serine
RRFSPPRRFFFRKNLLRLTG

SEQ ID NO: 4783 - protein, 20 aa, Artificial Sequence
  Description of Artificial Sequence: Synthetic peptide
  MOD_RES (4)..(4): phosphorylated serine
RRFSPPRRKFFRKNLLRLTG

SEQ ID NO: 4784 - protein, 20 aa, Artificial Sequence
  Description of Artificial Sequence: Synthetic peptide
  MOD_RES (4)..(4): phosphorylated serine
RRFSPPRRLFFRKNLLRLTG

SEQ ID NO: 4785 - protein, 20 aa, Artificial Sequence
  Description of Artificial Sequence: Synthetic peptide
  MOD_RES (4)..(4): phosphorylated serine
  MOD_RES (9)..(9): oxidized methionine
RRFSPPRRMFFRKNLLRLTG

SEQ ID NO: 4786 - protein, 20 aa, Artificial Sequence
  Description of Artificial Sequence: Synthetic peptide
  MOD_RES (4)..(4): phosphorylated serine
RRFSPPRRMFFRKNLLRLTG

SEQ ID NO: 4787 - protein, 20 aa, Artificial Sequence
  Description of Artificial Sequence: Synthetic peptide
  MOD_RES (4)..(4): phosphorylated serine
RRFSPPRRRFFRKNLLRLTG

SEQ ID NO: 4788 - protein, 20 aa, Artificial Sequence
  Description of Artificial Sequence: Synthetic peptide
  MOD_RES (4)..(4): phosphorylated serine
RRFSPPRRYFFRKNLLRLTG

SEQ ID NO: 4789 - protein, 21 aa, Artificial Sequence
  Description of Artificial Sequence: Synthetic peptide
  MOD_RES (4)..(4): phosphorylated serine
RRFSRLENRYFFRKNLLRLTG

SEQ ID NO: 4790 - protein, 20 aa, Artificial Sequence
  Description of Artificial Sequence: Synthetic peptide
  MOD_RES (4)..(4): phosphorylated serine
RRFSRSDELFFRKNLLRLTG

SEQ ID NO: 4791 - protein, 20 aa, Artificial Sequence
  Description of Artificial Sequence: Synthetic peptide
  MOD_RES (4)..(4): phosphorylated serine
  MOD_RES (6)..(6): phosphorylated serine
RRFSRSPIFFFRKNLLRLTG

SEQ ID NO: 4792 - protein, 20 aa, Artificial Sequence
  Description of Artificial Sequence: Synthetic peptide
  MOD_RES (4)..(4): phosphorylated serine
RRFSRSPIFFFRKNLLRLTG

SEQ ID NO: 4793 - protein, 20 aa, Artificial Sequence
  Description of Artificial Sequence: Synthetic peptide
  MOD_RES (4)..(4): phosphorylated serine
  MOD_RES (6)..(6): phosphorylated serine
RRFSRSPIKFFRKNLLRLTG

SEQ ID NO: 4794 - protein, 20 aa, Artificial Sequence
  Description of Artificial Sequence: Synthetic peptide
  MOD_RES (4)..(4): phosphorylated serine
RRFSRSPIKFFRKNLLRLTG

SEQ ID NO: 4795 - protein, 20 aa, Artificial Sequence
  Description of Artificial Sequence: Synthetic peptide
  MOD_RES (4)..(4): phosphorylated serine
  MOD_RES (6)..(6): phosphorylated serine
RRFSRSPILFFRKNLLRLTG

SEQ ID NO: 4796 - protein, 20 aa, Artificial Sequence
  Description of Artificial Sequence: Synthetic peptide
  MOD_RES (4)..(4): phosphorylated serine
RRFSRSPILFFRKNLLRLTG

SEQ ID NO: 4797 - protein, 20 aa, Artificial Sequence
  Description of Artificial Sequence: Synthetic peptide
  MOD_RES (4)..(4): phosphorylated serine
RRFSRSPIMFFRKNLLRLTG

SEQ ID NO: 4798 - protein, 20 aa, Artificial Sequence
  Description of Artificial Sequence: Synthetic peptide
  MOD_RES (4)..(4): phosphorylated serine
  MOD_RES (6)..(6): phosphorylated serine
RRFSRSPIRFFRKNLLRLTG

SEQ ID NO: 4799 - protein, 20 aa, Artificial Sequence
  Description of Artificial Sequence: Synthetic peptide
  MOD_RES (4)..(4): phosphorylated serine
RRFSRSPIRFFRKNLLRLTG

SEQ ID NO: 4800 - protein, 20 aa, Artificial Sequence
  Description of Artificial Sequence: Synthetic peptide
  MOD_RES (6)..(6): phosphorylated serine
RRFSRSPIRFFRKNLLRLTG

SEQ ID NO: 4801 - protein, 21 aa, Artificial Sequence
  Description of Artificial Sequence: Synthetic peptide
  MOD_RES (4)..(4): phosphorylated serine
  MOD_RES (6)..(6): phosphorylated serine
RRFSRSPIRFFFRKNLLRLTG

SEQ ID NO: 4802 - protein, 21 aa, Artificial Sequence
  Description of Artificial Sequence: Synthetic peptide
  MOD_RES (4)..(4): phosphorylated serine
RRFSRSPIRFFFRKNLLRLTG

SEQ ID NO: 4803 - protein, 21 aa, Artificial Sequence
  Description of Artificial Sequence: Synthetic peptide
  MOD_RES (4)..(4): phosphorylated serine
  MOD_RES (6)..(6): phosphorylated serine
RRFSRSPIRKFFRKNLLRLTG

SEQ ID NO: 4804 - protein, 21 aa, Artificial Sequence
  Description of Artificial Sequence: Synthetic peptide
  MOD_RES (4)..(4): phosphorylated serine
RRFSRSPIRKFFRKNLLRLTG

SEQ ID NO: 4805 - protein, 21 aa, Artificial Sequence
  Description of Artificial Sequence: Synthetic peptide
  MOD_RES (4)..(4): phosphorylated serine
  MOD_RES (6)..(6): phosphorylated serine
RRFSRSPIRLFFRKNLLRLTG

SEQ ID NO: 4806 - protein, 21 aa, Artificial Sequence
  Description of Artificial Sequence: Synthetic peptide
  MOD_RES (4)..(4): phosphorylated serine
RRFSRSPIRLFFRKNLLRLTG

SEQ ID NO: 4807 - protein, 21 aa, Artificial Sequence
  Description of Artificial Sequence: Synthetic peptide
  MOD_RES (4)..(4): phosphorylated serine
  MOD_RES (6)..(6): phosphorylated serine
RRFSRSPIRRFFRKNLLRLTG

SEQ ID NO: 4808 - protein, 21 aa, Artificial Sequence
  Description of Artificial Sequence: Synthetic peptide
  MOD_RES (4)..(4): phosphorylated serine
RRFSRSPIRRFFRKNLLRLTG

SEQ ID NO: 4809 - protein, 21 aa, Artificial Sequence
  Description of Artificial Sequence: Synthetic peptide
  MOD_RES (4)..(4): phosphorylated serine
  MOD_RES (6)..(6): phosphorylated serine
RRFSRSPIRYFFRKNLLRLTG

SEQ ID NO: 4810 - protein, 21 aa, Artificial Sequence
  Description of Artificial Sequence: Synthetic peptide
  MOD_RES (4)..(4): phosphorylated serine
RRFSRSPIRYFFRKNLLRLTG

SEQ ID NO: 4811 - protein, 20 aa, Artificial Sequence
  Description of Artificial Sequence: Synthetic peptide
  MOD_RES (4)..(4): phosphorylated serine
  MOD_RES (6)..(6): phosphorylated serine
RRFSRSPIYFFRKNLLRLTG

SEQ ID NO: 4812 - protein, 20 aa, Artificial Sequence
  Description of Artificial Sequence: Synthetic peptide
  MOD_RES (4)..(4): phosphorylated serine
RRFSRSPIYFFRKNLLRLTG

SEQ ID NO: 4813 - protein, 19 aa, Artificial Sequence
  Description of Artificial Sequence: Synthetic peptide
  MOD_RES (4)..(4): phosphorylated serine
RRFSRSPKFFRKNLLRLTG

SEQ ID NO: 4814 - protein, 21 aa, Artificial Sequence
  Description of Artificial Sequence: Synthetic peptide
  MOD_RES (5)..(5): phosphorylated serine
RRFSSPPRRMFFRKNLLRLTG

SEQ ID NO: 4815 - protein, 20 aa, Artificial Sequence
  Description of Artificial Sequence: Synthetic peptide
  MOD_RES (4)..(4): phosphorylated serine
RRFSVSTLRFFRKNLLRLTG

SEQ ID NO: 4816 - protein, 20 aa, Artificial Sequence
  Description of Artificial Sequence: Synthetic peptide
  MOD_RES (4)..(4): phosphorylated serine
RRFSVTTMRFFRKNLLRLTG

SEQ ID NO: 4817 - protein, 21 aa, Artificial Sequence
  Description of Artificial Sequence: Synthetic peptide
  MOD_RES (4)..(4): phosphorylated threonine
RRFTPPSPAFFFRKNLLRLTG

SEQ ID NO: 4818 - protein, 21 aa, Artificial Sequence
  Description of Artificial Sequence: Synthetic peptide
  MOD_RES (4)..(4): phosphorylated threonine
RRFTPPSPAKFFRKNLLRLTG

SEQ ID NO: 4819 - protein, 21 aa, Artificial Sequence
  Description of Artificial Sequence: Synthetic peptide
  MOD_RES (4)..(4): phosphorylated threonine
RRFTPPSPARFFRKNLLRLTG

SEQ ID NO: 4820 - protein, 21 aa, Artificial Sequence
  Description of Artificial Sequence: Synthetic peptide
  MOD_RES (4)..(4): phosphorylated threonine
RRFTPPSPAYFFRKNLLRLTG

SEQ ID NO: 4821 - protein, 20 aa, Artificial Sequence
  Description of Artificial Sequence: Synthetic peptide
  MOD_RES (4)..(4): phosphorylated serine
RRGSFEVTLFFRKNLLRLTG

SEQ ID NO: 4822 - protein, 22 aa, Artificial Sequence
  Description of Artificial Sequence: Synthetic peptide
  MOD_RES (4)..(4): phosphorylated serine
RRHSASNLHALFFRKNLLRLTG

SEQ ID NO: 4823 - protein, 21 aa, Artificial Sequence
  Description of Artificial Sequence: Synthetic peptide
  MOD_RES (6)..(6): phosphorylated serine
RRIDISPSTFFFRKNLLRLTG

SEQ ID NO: 4824 - protein, 21 aa, Artificial Sequence
  Description of Artificial Sequence: Synthetic peptide
  MOD_RES (6)..(6): phosphorylated serine
RRIDISPSTKFFRKNLLRLTG

SEQ ID NO: 4825 - protein, 22 aa, Artificial Sequence
  Description of Artificial Sequence: Synthetic peptide
  MOD_RES (6)..(6): phosphorylated serine
RRIDISPSTLRFFRKNLLRLTG

SEQ ID NO: 4826 - protein, 23 aa, Artificial Sequence
  Description of Artificial Sequence: Synthetic peptide
  MOD_RES (6)..(6): phosphorylated serine
RRIDISPSTLRKFFRKNLLRLTG

SEQ ID NO: 4827 - protein, 21 aa, Artificial Sequence
  Description of Artificial Sequence: Synthetic peptide
  MOD_RES (6)..(6): phosphorylated serine
RRIDISPSTRFFRKNLLRLTG

SEQ ID NO: 4828 - protein, 21 aa, Artificial Sequence
  Description of Artificial Sequence: Synthetic peptide
  MOD_RES (6)..(6): phosphorylated serine
RRIDISPSTYFFRKNLLRLTG

SEQ ID NO: 4829 - protein, 20 aa, Artificial Sequence
  Description of Artificial Sequence: Synthetic peptide
  MOD_RES (4)..(4): phosphorylated serine
RRISDPEVFFFRKNLLRLTG

SEQ ID NO: 4830 - protein, 20 aa, Artificial Sequence
  Description of Artificial Sequence: Synthetic peptide
  MOD_RES (4)..(4): phosphorylated serine
RRISDPQVFFFRKNLLRLTG

SEQ ID NO: 4831 - protein, 20 aa, Artificial Sequence
  Description of Artificial Sequence: Synthetic peptide
  MOD_RES (4)..(4): phosphorylated serine
RRISGVDRFFFRKNLLRLTG

SEQ ID NO: 4832 - protein, 20 aa, Artificial Sequence
  Description of Artificial Sequence: Synthetic peptide
  MOD_RES (4)..(4): phosphorylated serine
RRISGVDRKFFRKNLLRLTG

SEQ ID NO: 4833 - protein, 20 aa, Artificial Sequence
  Description of Artificial Sequence: Synthetic peptide
  MOD_RES (4)..(4): phosphorylated serine
RRISGVDRLFFRKNLLRLTG

SEQ ID NO: 4834 - protein, 20 aa, Artificial Sequence
  Description of Artificial Sequence: Synthetic peptide
  MOD_RES (4)..(4): phosphorylated serine
RRISGVDRMFFRKNLLRLTG

SEQ ID NO: 4835 - protein, 20 aa, Artificial Sequence
  Description of Artificial Sequence: Synthetic peptide
  MOD_RES (4)..(4): phosphorylated serine
RRISGVDRRFFRKNLLRLTG

SEQ ID NO: 4836 - protein, 20 aa, Artificial Sequence
  Description of Artificial Sequence: Synthetic peptide
  MOD_RES (4)..(4): phosphorylated serine
RRISGVDRYFFRKNLLRLTG

SEQ ID NO: 4837 - protein, 21 aa, Artificial Sequence
  Description of Artificial Sequence: Synthetic peptide
  MOD_RES (4)..(4): phosphorylated serine
RRISGVDRYFFFRKNLLRLTG

SEQ ID NO: 4838 - protein, 21 aa, Artificial Sequence
  Description of Artificial Sequence: Synthetic peptide
  MOD_RES (4)..(4): phosphorylated serine
RRISGVDRYKFFRKNLLRLTG

SEQ ID NO: 4839 - protein, 21 aa, Artificial Sequence
  Description of Artificial Sequence: Synthetic peptide
  MOD_RES (4)..(4): phosphorylated serine
RRISGVDRYLFFRKNLLRLTG

SEQ ID NO: 4840 - protein, 21 aa, Artificial Sequence
  Description of Artificial Sequence: Synthetic peptide
  MOD_RES (4)..(4): phosphorylated serine
RRISGVDRYRFFRKNLLRLTG

SEQ ID NO: 4841 - protein, 21 aa, Artificial Sequence
  Description of Artificial Sequence: Synthetic peptide
  MOD_RES (4)..(4): phosphorylated serine
RRISGVDRYYFFRKNLLRLTG

SEQ ID NO: 4842 - protein, 20 aa, Artificial Sequence
  Description of Artificial Sequence: Synthetic peptide
  MOD_RES (4)..(4): phosphorylated serine
RRISPAPQRFFRKNLLRLTG

SEQ ID NO: 4843 - protein, 20 aa, Artificial Sequence
  Description of Artificial Sequence: Synthetic peptide
  MOD_RES (4)..(4): phosphorylated serine
RRISQIQQLFFRKNLLRLTG

SEQ ID NO: 4844 - protein, 20 aa, Artificial Sequence
  Description of Artificial Sequence: Synthetic peptide
  MOD_RES (4)..(4): phosphorylated serine
RRKSQVAEFFFRKNLLRLTG

SEQ ID NO: 4845 - protein, 20 aa, Artificial Sequence
  Description of Artificial Sequence: Synthetic peptide
  MOD_RES (4)..(4): phosphorylated serine
RRKSQVAEKFFRKNLLRLTG

SEQ ID NO: 4846 - protein, 20 aa, Artificial Sequence
  Description of Artificial Sequence: Synthetic peptide
  MOD_RES (4)..(4): phosphorylated serine
RRKSPPPSFFFRKNLLRLTG

SEQ ID NO: 4847 - protein, 20 aa, Artificial Sequence
  Description of Artificial Sequence: Synthetic peptide
  MOD_RES (4)..(4): phosphorylated serine
RRKSPPPSKFFRKNLLRLTG

SEQ ID NO: 4848 - protein, 20 aa, Artificial Sequence
  Description of Artificial Sequence: Synthetic peptide
  MOD_RES (4)..(4): phosphorylated serine
RRKSPPPSLFFRKNLLRLTG

SEQ ID NO: 4849 - protein, 20 aa, Artificial Sequence
  Description of Artificial Sequence: Synthetic peptide
  MOD_RES (4)..(4): phosphorylated serine
RRKSPPPSMFFRKNLLRLTG

SEQ ID NO: 4850 - protein, 20 aa, Artificial Sequence
  Description of Artificial Sequence: Synthetic peptide
  MOD_RES (4)..(4): phosphorylated serine
RRKSPPPSRFFRKNLLRLTG

SEQ ID NO: 4851 - protein, 20 aa, Artificial Sequence
  Description of Artificial Sequence: Synthetic peptide
  MOD_RES (4)..(4): phosphorylated serine
RRKSQLDSFFFRKNLLRLTG

SEQ ID NO: 4852 - protein, 20 aa, Artificial Sequence
  Description of Artificial Sequence: Synthetic peptide
  MOD_RES (4)..(4): phosphorylated serine
RRKSQLDSKFFRKNLLRLTG

SEQ ID NO: 4853 - protein, 20 aa, Artificial Sequence
  Description of Artificial Sequence: Synthetic peptide
  MOD_RES (4)..(4): phosphorylated serine
RRKSQLDSLFFRKNLLRLTG

SEQ ID NO: 4854 - protein, 20 aa, Artificial Sequence
  Description of Artificial Sequence: Synthetic peptide
  MOD_RES (4)..(4): phosphorylated serine
RRKSQLDSMFFRKNLLRLTG

SEQ ID NO: 4855 - protein, 20 aa, Artificial Sequence
  Description of Artificial Sequence: Synthetic peptide
  MOD_RES (4)..(4): phosphorylated serine
RRKSQLDSRFFRKNLLRLTG

SEQ ID NO: 4856 - protein, 20 aa, Artificial Sequence
  Description of Artificial Sequence: Synthetic peptide
  MOD_RES (4)..(4): phosphorylated serine
RRKSQLDSYFFRKNLLRLTG

SEQ ID NO: 4857 - protein, 20 aa, Artificial Sequence
  Description of Artificial Sequence: Synthetic peptide
  MOD_RES (4)..(4): phosphorylated serine
RRKSQVAEFFFRKNLLRLTG

SEQ ID NO: 4858 - protein, 20 aa, Artificial Sequence
  Description of Artificial Sequence: Synthetic peptide
  MOD_RES (4)..(4): phosphorylated serine
RRKSQVAEKFFRKNLLRLTG

SEQ ID NO: 4859 - protein, 20 aa, Artificial Sequence
  Description of Artificial Sequence: Synthetic peptide
  MOD_RES (4)..(4): phosphorylated serine
RRKSQVAELFFRKNLLRLTG

SEQ ID NO: 4860 - protein, 20 aa, Artificial Sequence
  Description of Artificial Sequence: Synthetic peptide
  MOD_RES (4)..(4): phosphorylated serine
RRKSQVAEMFFRKNLLRLTG

SEQ ID NO: 4861 - protein, 20 aa, Artificial Sequence
  Description of Artificial Sequence: Synthetic peptide
  MOD_RES (4)..(4): phosphorylated serine
RRKSQVAERFFRKNLLRLTG

SEQ ID NO: 4862 - protein, 20 aa, Artificial Sequence
  Description of Artificial Sequence: Synthetic peptide
  MOD_RES (4)..(4): phosphorylated serine
RRKSQVAEVFFRKNLLRLTG

SEQ ID NO: 4863 - protein, 20 aa, Artificial Sequence
  Description of Artificial Sequence: Synthetic peptide
  MOD_RES (4)..(4): phosphorylated serine
RRKSQVAEYFFRKNLLRLTG

SEQ ID NO: 4864 - protein, 20 aa, Artificial Sequence
  Description of Artificial Sequence: Synthetic peptide
  MOD_RES (5)..(5): phosphorylated serine
RRLGSPHRFFFRKNLLRLTG

SEQ ID NO: 4865 - protein, 20 aa, Artificial Sequence
  Description of Artificial Sequence: Synthetic peptide
  MOD_RES (5)..(5): phosphorylated serine
RRLGSPHRKFFRKNLLRLTG

SEQ ID NO: 4866 - protein, 20 aa, Artificial Sequence
  Description of Artificial Sequence: Synthetic peptide
  MOD_RES (5)..(5): phosphorylated serine
RRLGSPHRLFFRKNLLRLTG

SEQ ID NO: 4867 - protein, 20 aa, Artificial Sequence
  Description of Artificial Sequence: Synthetic peptide
  MOD_RES (5)..(5): phosphorylated serine
RRLGSPHRMFFRKNLLRLTG

SEQ ID NO: 4868 - protein, 20 aa, Artificial Sequence
  Description of Artificial Sequence: Synthetic peptide
  MOD_RES (5)..(5): phosphorylated serine
RRLGSPHRRFFRKNLLRLTG

SEQ ID NO: 4869 - protein, 20 aa, Artificial Sequence
  Description of Artificial Sequence: Synthetic peptide
  MOD_RES (4)..(4): phosphorylated serine
RRLSADIRFFFRKNLLRLTG

SEQ ID NO: 4870 - protein, 20 aa, Artificial Sequence
  Description of Artificial Sequence: Synthetic peptide
  MOD_RES (4)..(4): phosphorylated serine
RRLSADIRKFFRKNLLRLTG

SEQ ID NO: 4871 - protein, 20 aa, Artificial Sequence
  Description of Artificial Sequence: Synthetic peptide
  MOD_RES (4)..(4): phosphorylated serine
RRLSADIRLFFRKNLLRLTG

SEQ ID NO: 4872 - protein, 20 aa, Artificial Sequence
  Description of Artificial Sequence: Synthetic peptide
  MOD_RES (4)..(4): phosphorylated serine
RRLSADIRMFFRKNLLRLTG

SEQ ID NO: 4873 - protein, 20 aa, Artificial Sequence
  Description of Artificial Sequence: Synthetic peptide
  MOD_RES (4)..(4): phosphorylated serine
RRLSADIRRFFRKNLLRLTG

SEQ ID NO: 4874 - protein, 20 aa, Artificial Sequence
  Description of Artificial Sequence: Synthetic peptide
  MOD_RES (4)..(4): phosphorylated serine
RRLSADIRYFFRKNLLRLTG

SEQ ID NO: 4875 - protein, 20 aa, Artificial Sequence
  Description of Artificial Sequence: Synthetic peptide
  MOD_RES (4)..(4): phosphorylated serine
RRLSDSPVFFFRKNLLRLTG

SEQ ID NO: 4876 - protein, 20 aa, Artificial Sequence
  Description of Artificial Sequence: Synthetic peptide
  MOD_RES (4)..(4): phosphorylated serine
RRLSELLRYFFRKNLLRLTG

SEQ ID NO: 4877 - protein, 20 aa, Artificial Sequence
  Description of Artificial Sequence: Synthetic peptide
  MOD_RES (4)..(4): phosphorylated serine
RRLSERETRFFRKNLLRLTG

SEQ ID NO: 4878 - protein, 20 aa, Artificial Sequence
  Description of Artificial Sequence: Synthetic peptide
  MOD_RES (4)..(4): phosphorylated serine
RRLSESSALFFRKNLLRLTG

SEQ ID NO: 4879 - protein, 20 aa, Artificial Sequence
  Description of Artificial Sequence: Synthetic peptide
  MOD_RES (4)..(4): phosphorylated serine
RRLSFLVSFFFRKNLLRLTG

SEQ ID NO: 4880 - protein, 20 aa, Artificial Sequence
  Description of Artificial Sequence: Synthetic peptide
  MOD_RES (4)..(4): phosphorylated serine
RRLSFLVSKFFRKNLLRLTG

SEQ ID NO: 4881 - protein, 20 aa, Artificial Sequence
  Description of Artificial Sequence: Synthetic peptide
  MOD_RES (4)..(4): phosphorylated serine
RRLSFLVSLFFRKNLLRLTG

SEQ ID NO: 4882 - protein, 20 aa, Artificial Sequence
  Description of Artificial Sequence: Synthetic peptide
  MOD_RES (4)..(4): phosphorylated serine
RRLSFLVSMFFRKNLLRLTG

SEQ ID NO: 4883 - protein, 20 aa, Artificial Sequence
  Description of Artificial Sequence: Synthetic peptide
  MOD_RES (4)..(4): phosphorylated serine
RRLSFLVSRFFRKNLLRLTG

SEQ ID NO: 4884 - protein, 20 aa, Artificial Sequence
  Description of Artificial Sequence: Synthetic peptide
  MOD_RES (4)..(4): phosphorylated serine
RRLSFLVSYFFRKNLLRLTG

SEQ ID NO: 4885 - protein, 21 aa, Artificial Sequence
  Description of Artificial Sequence: Synthetic peptide
  MOD_RES (4)..(4): phosphorylated serine
RRLSGGSHSFFFRKNLLRLTG

SEQ ID NO: 4886 - protein, 21 aa, Artificial Sequence
  Description of Artificial Sequence: Synthetic peptide
  MOD_RES (4)..(4): phosphorylated serine
RRLSGGSHSKFFRKNLLRLTG

SEQ ID NO: 4887 - protein, 21 aa, Artificial Sequence
  Description of Artificial Sequence: Synthetic peptide
  MOD_RES (4)..(4): phosphorylated serine
RRLSGGSHSLFFRKNLLRLTG

SEQ ID NO: 4888 - protein, 21 aa, Artificial Sequence
  Description of Artificial Sequence: Synthetic peptide
  MOD_RES (4)..(4): phosphorylated serine
RRLSGGSHSMFFRKNLLRLTG

SEQ ID NO: 4889 - protein, 21 aa, Artificial Sequence
  Description of Artificial Sequence: Synthetic peptide
  MOD_RES (4)..(4): phosphorylated serine
RRLSGGSHSRFFRKNLLRLTG

SEQ ID NO: 4890 - protein, 21 aa, Artificial Sequence
  Description of Artificial Sequence: Synthetic peptide
  MOD_RES (4)..(4): phosphorylated serine
RRLSGGSHSYFFRKNLLRLTG

SEQ ID NO: 4891 - protein, 21 aa, Artificial Sequence
  Description of Artificial Sequence: Synthetic peptide
  MOD_RES (4)..(4): phosphorylated serine
RRLSGPLHTFFFRKNLLRLTG

SEQ ID NO: 4892 - protein, 21 aa, Artificial Sequence
  Description of Artificial Sequence: Synthetic peptide
  MOD_RES (4)..(4): phosphorylated serine
RRLSGPLHTKFFRKNLLRLTG

SEQ ID NO: 4893 - protein, 21 aa, Artificial Sequence
  Description of Artificial Sequence: Synthetic peptide
  MOD_RES (4)..(4): phosphorylated serine
RRLSGPLHTLFFRKNLLRLTG

SEQ ID NO: 4894 - protein, 21 aa, Artificial Sequence
  Description of Artificial Sequence: Synthetic peptide
  MOD_RES (4)..(4): phosphorylated serine
RRLSGPLHTMFFRKNLLRLTG

SEQ ID NO: 4895 - protein, 21 aa, Artificial Sequence
  Description of Artificial Sequence: Synthetic peptide
  MOD_RES (4)..(4): phosphorylated serine
RRLSGPLHTRFFRKNLLRLTG

SEQ ID NO: 4896 - protein, 21 aa, Artificial Sequence
  Description of Artificial Sequence: Synthetic peptide
  MOD_RES (4)..(4): phosphorylated serine
RRLSGPLHTVFFRKNLLRLTG

SEQ ID NO: 4897 - protein, 21 aa, Artificial Sequence
  Description of Artificial Sequence: Synthetic peptide
  MOD_RES (4)..(4): phosphorylated serine
RRLSGPLHTYFFRKNLLRLTG

SEQ ID NO: 4898 - protein, 20 aa, Artificial Sequence
  Description of Artificial Sequence: Synthetic peptide
  MOD_RES (4)..(4): phosphorylated serine
RRLSLFLNVFFRKNLLRLTG

SEQ ID NO: 4899 - protein, 20 aa, Artificial Sequence
  Description of Artificial Sequence: Synthetic peptide
  MOD_RES (4)..(4): phosphorylated serine
RRLSNLPTFFFRKNLLRLTG

SEQ ID NO: 4900 - protein, 20 aa, Artificial Sequence
  Description of Artificial Sequence: Synthetic peptide
  MOD_RES (4)..(4): phosphorylated serine
RRLSNLPTKFFRKNLLRLTG

SEQ ID NO: 4901 - protein, 20 aa, Artificial Sequence
  Description of Artificial Sequence: Synthetic peptide
  MOD_RES (4)..(4): phosphorylated serine
RRLSNLPTRFFRKNLLRLTG

SEQ ID NO: 4902 - protein, 20 aa, Artificial Sequence
  Description of Artificial Sequence: Synthetic peptide
  MOD_RES (4)..(4): phosphorylated serine
RRLSNLPTVFFRKNLLRLTG

SEQ ID NO: 4903 - protein, 20 aa, Artificial Sequence
  Description of Artificial Sequence: Synthetic peptide
  MOD_RES (4)..(4): phosphorylated serine
RRLSNLPTYFFRKNLLRLTG

SEQ ID NO: 4904 - protein, 20 aa, Artificial Sequence
  Description of Artificial Sequence: Synthetic peptide
  MOD_RES (4)..(4): phosphorylated serine
RRLSPAPQFFFRKNLLRLTG

SEQ ID NO: 4905 - protein, 20 aa, Artificial Sequence
  Description of Artificial Sequence: Synthetic peptide
  MOD_RES (4)..(4): phosphorylated serine
RRLSPAPQKFFRKNLLRLTG

SEQ ID NO: 4906 - protein, 20 aa, Artificial Sequence
  Description of Artificial Sequence: Synthetic peptide
  MOD_RES (4)..(4): phosphorylated serine
RRLSPAPQLFFRKNLLRLTG

SEQ ID NO: 4907 - protein, 20 aa, Artificial Sequence
  Description of Artificial Sequence: Synthetic peptide
  MOD_RES (4)..(4): phosphorylated serine
RRLSPAPQMFFRKNLLRLTG

SEQ ID NO: 4908 - protein, 22 aa, Artificial Sequence
  Description of Artificial Sequence: Synthetic peptide
  MOD_RES (4)..(4): phosphorylated serine
RRLSPKASQVFFFRKNLLRLTG

SEQ ID NO: 4909 - protein, 22 aa, Artificial Sequence
  Description of Artificial Sequence: Synthetic peptide
  MOD_RES (4)..(4): phosphorylated serine
RRLSPKASQVKFFRKNLLRLTG

SEQ ID NO: 4910 - protein, 22 aa, Artificial Sequence
  Description of Artificial Sequence: Synthetic peptide
  MOD_RES (4)..(4): phosphorylated serine
RRLSPKASQVLFFRKNLLRLTG

SEQ ID NO: 4911 - protein, 22 aa, Artificial Sequence
  Description of Artificial Sequence: Synthetic peptide
  MOD_RES (4)..(4): phosphorylated serine
RRLSPKASQVMFFRKNLLRLTG

SEQ ID NO: 4912 - protein, 22 aa, Artificial Sequence
  Description of Artificial Sequence: Synthetic peptide
  MOD_RES (4)..(4): phosphorylated serine
RRLSPKASQVRFFRKNLLRLTG

SEQ ID NO: 4913 - protein, 21 aa, Artificial Sequence
  Description of Artificial Sequence: Synthetic peptide
  MOD_RES (4)..(4): phosphorylated serine
RRLSPVPVPFFFRKNLLRLTG

SEQ ID NO: 4914 - protein, 21 aa, Artificial Sequence
  Description of Artificial Sequence: Synthetic peptide
  MOD_RES (4)..(4): phosphorylated serine
RRLSPVPVPKFFRKNLLRLTG

SEQ ID NO: 4915 - protein, 21 aa, Artificial Sequence
  Description of Artificial Sequence: Synthetic peptide
  MOD_RES (4)..(4): phosphorylated serine
RRLSPVPVPLFFRKNLLRLTG

SEQ ID NO: 4916 - protein, 21 aa, Artificial Sequence
  Description of Artificial Sequence: Synthetic peptide
  MOD_RES (4)..(4): phosphorylated serine
RRLSPVPVPMFFRKNLLRLTG

SEQ ID NO: 4917 - protein, 21 aa, Artificial Sequence
  Description of Artificial Sequence: Synthetic peptide
  MOD_RES (4)..(4): phosphorylated serine
RRLSPVPVPRFFRKNLLRLTG

SEQ ID NO: 4918 - protein, 20 aa, Artificial Sequence
  Description of Artificial Sequence: Synthetic peptide
  MOD_RES (4)..(4): phosphorylated serine
RRLSRELQKFFRKNLLRLTG

SEQ ID NO: 4919 - protein, 20 aa, Artificial Sequence
  Description of Artificial Sequence: Synthetic peptide
  MOD_RES (4)..(4): phosphorylated serine
RRLSRELQFFFRKNLLRLTG

SEQ ID NO: 4920 - protein, 20 aa, Artificial Sequence
  Description of Artificial Sequence: Synthetic peptide
  MOD_RES (4)..(4): phosphorylated serine
RRLSRELQLFFRKNLLRLTG

SEQ ID NO: 4921 - protein, 20 aa, Artificial Sequence
  Description of Artificial Sequence: Synthetic peptide
  MOD_RES (4)..(4): phosphorylated serine
RRLSRELQMFFRKNLLRLTG

SEQ ID NO: 4922 - protein, 20 aa, Artificial Sequence
  Description of Artificial Sequence: Synthetic peptide
  MOD_RES (4)..(4): phosphorylated serine
RRLSRELQRFFRKNLLRLTG

SEQ ID NO: 4923 - protein, 20 aa, Artificial Sequence
  Description of Artificial Sequence: Synthetic peptide
  MOD_RES (4)..(4): phosphorylated serine
RRLSRKLSLFFRKNLLRLTG

SEQ ID NO: 4924 - protein, 20 aa, Artificial Sequence
  Description of Artificial Sequence: Synthetic peptide
  MOD_RES (4)..(4): phosphorylated serine
RRLSVERIFFFRKNLLRLTG

SEQ ID NO: 4925 - protein, 20 aa, Artificial Sequence
  Description of Artificial Sequence: Synthetic peptide
  MOD_RES (4)..(4): phosphorylated serine
RRLSVERIKFFRKNLLRLTG

SEQ ID NO: 4926 - protein, 20 aa, Artificial Sequence
  Description of Artificial Sequence: Synthetic peptide
  MOD_RES (4)..(4): phosphorylated serine
RRLSVERIMFFRKNLLRLTG

SEQ ID NO: 4927 - protein, 20 aa, Artificial Sequence
  Description of Artificial Sequence: Synthetic peptide
  MOD_RES (4)..(4): phosphorylated serine
RRLSVERIRFFRKNLLRLTG

SEQ ID NO: 4928 - protein, 20 aa, Artificial Sequence
  Description of Artificial Sequence: Synthetic peptide
  MOD_RES (4)..(4): phosphorylated serine
RRLSYVLFIFFRKNLLRLTG

SEQ ID NO: 4929 - protein, 19 aa, Artificial Sequence
  Description of Artificial Sequence: Synthetic peptide
  MOD_RES (7)..(7): phosphorylated serine
RRLTHLSFFFRKNLLRLTG

SEQ ID NO: 4930 - protein, 19 aa, Artificial Sequence
  Description of Artificial Sequence: Synthetic peptide
  MOD_RES (7)..(7): phosphorylated serine
RRLTHLSKFFRKNLLRLTG

SEQ ID NO: 4931 - protein, 19 aa, Artificial Sequence
  Description of Artificial Sequence: Synthetic peptide
  MOD_RES (7)..(7): phosphorylated serine
RRLTHLSLFFRKNLLRLTG

SEQ ID NO: 4932 - protein, 19 aa, Artificial Sequence
  Description of Artificial Sequence: Synthetic peptide
  MOD_RES (7)..(7): phosphorylated serine
RRLTHLSMFFRKNLLRLTG

SEQ ID NO: 4933 - protein, 19 aa, Artificial Sequence
  Description of Artificial Sequence: Synthetic peptide
  MOD_RES (7)..(7): phosphorylated serine
RRLTHLSRFFRKNLLRLTG

SEQ ID NO: 4934 - protein, 19 aa, Artificial Sequence
  Description of Artificial Sequence: Synthetic peptide
  MOD_RES (4)..(4): phosphorylated serine
RRMSFQKPFFRKNLLRLTG

SEQ ID NO: 4935 - protein, 20 aa, Artificial Sequence
  Description of Artificial Sequence: Synthetic peptide
  MOD_RES (4)..(4): phosphorylated serine
RRMSLLSVFFFRKNLLRLTG

SEQ ID NO: 4936 - protein, 20 aa, Artificial Sequence
  Description of Artificial Sequence: Synthetic peptide
  MOD_RES (4)..(4): phosphorylated serine
RRMSLLSVKFFRKNLLRLTG

SEQ ID NO: 4937 - protein, 20 aa, Artificial Sequence
  Description of Artificial Sequence: Synthetic peptide
  MOD_RES (4)..(4): phosphorylated serine
RRMSLLSVLFFRKNLLRLTG

SEQ ID NO: 4938 - protein, 20 aa, Artificial Sequence
  Description of Artificial Sequence: Synthetic peptide
  MOD_RES (4)..(4): phosphorylated serine
RRMSLLSVMFFRKNLLRLTG

SEQ ID NO: 4939 - protein, 20 aa, Artificial Sequence
  Description of Artificial Sequence: Synthetic peptide
  MOD_RES (4)..(4): phosphorylated serine
RRMSLLSVRFFRKNLLRLTG

SEQ ID NO: 4940 - protein, 20 aa, Artificial Sequence
  Description of Artificial Sequence: Synthetic peptide
  MOD_RES (3)..(3): oxidized methionine
  MOD_RES (4)..(4): phosphorylated serine
RRMSLLSVVFFRKNLLRLTG

SEQ ID NO: 4941 - protein, 20 aa, Artificial Sequence
  Description of Artificial Sequence: Synthetic peptide
  MOD_RES (4)..(4): phosphorylated serine
RRMSLLSVVFFRKNLLRLTG

SEQ ID NO: 4942 - protein, 20 aa, Artificial Sequence
  Description of Artificial Sequence: Synthetic peptide
  MOD_RES (4)..(4): phosphorylated serine
RRMSLLSVYFFRKNLLRLTG

SEQ ID NO: 4943 - protein, 19 aa, Artificial Sequence
  Description of Artificial Sequence: Synthetic peptide
  MOD_RES (4)..(4): phosphorylated serine
RRMSLLSWFFRKNLLRLTG

SEQ ID NO: 4944 - protein, 19 aa, Artificial Sequence
  Description of Artificial Sequence: Synthetic peptide
  MOD_RES (4)..(4): phosphorylated serine
RRMSLSVMFFRKNLLRLTG

SEQ ID NO: 4945 - protein, 20 aa, Artificial Sequence
  Description of Artificial Sequence: Synthetic peptide
  MOD_RES (4)..(4): phosphorylated serine
RRMSPIKPLFFRKNLLRLTG

SEQ ID NO: 4946 - protein, 20 aa, Artificial Sequence
  Description of Artificial Sequence: Synthetic peptide
  MOD_RES (4)..(4): phosphorylated serine
RRMSPKAQRFFRKNLLRLTG

SEQ ID NO: 4947 - protein, 20 aa, Artificial Sequence
  Description of Artificial Sequence: Synthetic peptide
  MOD_RES (4)..(4): phosphorylated serine
RRMSPKAQFFFRKNLLRLTG

SEQ ID NO: 4948 - protein, 20 aa, Artificial Sequence
  Description of Artificial Sequence: Synthetic peptide
  MOD_RES (4)..(4): phosphorylated serine
RRMSPKAQKFFRKNLLRLTG

SEQ ID NO: 4949 - protein, 20 aa, Artificial Sequence
  Description of Artificial Sequence: Synthetic peptide
  MOD_RES (4)..(4): phosphorylated serine
RRMSPKAQLFFRKNLLRLTG

SEQ ID NO: 4950 - protein, 20 aa, Artificial Sequence
  Description of Artificial Sequence: Synthetic peptide
  MOD_RES (4)..(4): phosphorylated serine
RRMSPKAQMFFRKNLLRLTG

SEQ ID NO: 4951 - protein, 19 aa, Artificial Sequence
  Description of Artificial Sequence: Synthetic peptide
  MOD_RES (4)..(4): phosphorylated serine
RRMSPKPFFFRKNLLRLTG

SEQ ID NO: 4952 - protein, 19 aa, Artificial Sequence
  Description of Artificial Sequence: Synthetic peptide
  MOD_RES (4)..(4): phosphorylated serine
RRMSPKPKFFRKNLLRLTG

SEQ ID NO: 4953 - protein, 19 aa, Artificial Sequence
  Description of Artificial Sequence: Synthetic peptide
  MOD_RES (4)..(4): phosphorylated serine
RRMSPKPMFFRKNLLRLTG

SEQ ID NO: 4954 - protein, 19 aa, Artificial Sequence
  Description of Artificial Sequence: Synthetic peptide
  MOD_RES (4)..(4): phosphorylated serine
RRMSPKPRFFRKNLLRLTG

SEQ ID NO: 4955 - protein, 20 aa, Artificial Sequence
  Description of Artificial Sequence: Synthetic peptide
  MOD_RES (4)..(4): phosphorylated serine
RRNSAPVSVFFRKNLLRLTG

SEQ ID NO: 4956 - protein, 20 aa, Artificial Sequence
  Description of Artificial Sequence: Synthetic peptide
  MOD_RES (4)..(4): phosphorylated serine
RRNSINRNFFFRKNLLRLTG

SEQ ID NO: 4957 - protein, 22 aa, Artificial Sequence
  Description of Artificial Sequence: Synthetic peptide
  MOD_RES (4)..(4): phosphorylated serine
RRNSNPVIAEFFFRKNLLRLTG

SEQ ID NO: 4958 - protein, 22 aa, Artificial Sequence
  Description of Artificial Sequence: Synthetic peptide
  MOD_RES (4)..(4): phosphorylated serine
RRNSNPVIAEKFFRKNLLRLTG

SEQ ID NO: 4959 - protein, 22 aa, Artificial Sequence
  Description of Artificial Sequence: Synthetic peptide
  MOD_RES (4)..(4): phosphorylated serine
RRNSNPVIAELFFRKNLLRLTG

SEQ ID NO: 4960 - protein, 22 aa, Artificial Sequence
  Description of Artificial Sequence: Synthetic peptide
  MOD_RES (4)..(4): phosphorylated serine
RRNSNPVIAEMFFRKNLLRLTG

SEQ ID NO: 4961 - protein, 22 aa, Artificial Sequence
  Description of Artificial Sequence: Synthetic peptide
  MOD_RES (4)..(4): phosphorylated serine
RRNSNPVIAERFFRKNLLRLTG

SEQ ID NO: 4962 - protein, 20 aa, Artificial Sequence
  Description of Artificial Sequence: Synthetic peptide
  MOD_RES (4)..(4): phosphorylated serine
RRNSSERTFFFRKNLLRLTG

SEQ ID NO: 4963 - protein, 20 aa, Artificial Sequence
  Description of Artificial Sequence: Synthetic peptide
  MOD_RES (4)..(4): phosphorylated serine
RRNSSERTKFFRKNLLRLTG

SEQ ID NO: 4964 - protein, 20 aa, Artificial Sequence
  Description of Artificial Sequence: Synthetic peptide
  MOD_RES (4)..(4): phosphorylated serine
RRNSSERTLFFRKNLLRLTG

SEQ ID NO: 4965 - protein, 20 aa, Artificial Sequence
  Description of Artificial Sequence: Synthetic peptide
  MOD_RES (4)..(4): phosphorylated serine
RRNSSERTMFFRKNLLRLTG

SEQ ID NO: 4966 - protein, 20 aa, Artificial Sequence
  Description of Artificial Sequence: Synthetic peptide
  MOD_RES (4)..(4): phosphorylated serine
RRNSSERTRFFRKNLLRLTG

SEQ ID NO: 4967 - protein, 20 aa, Artificial Sequence
  Description of Artificial Sequence: Synthetic peptide
  MOD_RES (4)..(4): phosphorylated serine
RRNSSERTYFFRKNLLRLTG

SEQ ID NO: 4968 - protein, 20 aa, Artificial Sequence
  Description of Artificial Sequence: Synthetic peptide
  MOD_RES (4)..(4): phosphorylated serine
RRNSSIVGFFFRKNLLRLTG

SEQ ID NO: 4969 - protein, 20 aa, Artificial Sequence
  Description of Artificial Sequence: Synthetic peptide
  MOD_RES (4)..(4): phosphorylated serine
RRNSSIVGKFFRKNLLRLTG

SEQ ID NO: 4970 - protein, 20 aa, Artificial Sequence
  Description of Artificial Sequence: Synthetic peptide
  MOD_RES (4)..(4): phosphorylated serine
RRNSSIVGLFFRKNLLRLTG

SEQ ID NO: 4971 - protein, 20 aa, Artificial Sequence
  Description of Artificial Sequence: Synthetic peptide
  MOD_RES (4)..(4): phosphorylated serine
RRNSSIVGMFFRKNLLRLTG

SEQ ID NO: 4972 - protein, 20 aa, Artificial Sequence
  Description of Artificial Sequence: Synthetic peptide
  MOD_RES (4)..(4): phosphorylated serine
RRNSSIVGRFFRKNLLRLTG

SEQ ID NO: 4973 - protein, 20 aa, Artificial Sequence
  Description of Artificial Sequence: Synthetic peptide
  MOD_RES (4)..(4): phosphorylated serine
RRNSSIVGYFFRKNLLRLTG

SEQ ID NO: 4974 - protein, 21 aa, Artificial Sequence
  Description of Artificial Sequence: Synthetic peptide
  MOD_RES (4)..(4): phosphorylated serine
RRNSVFQQGFFFRKNLLRLTG

SEQ ID NO: 4975 - protein, 21 aa, Artificial Sequence
  Description of Artificial Sequence: Synthetic peptide
  MOD_RES (4)..(4): phosphorylated serine
RRNSVFQQGKFFRKNLLRLTG

SEQ ID NO: 4976 - protein, 21 aa, Artificial Sequence
  Description of Artificial Sequence: Synthetic peptide
  MOD_RES (4)..(4): phosphorylated serine
RRNSVFQQGLFFRKNLLRLTG

SEQ ID NO: 4977 - protein, 21 aa, Artificial Sequence
  Description of Artificial Sequence: Synthetic peptide
  MOD_RES (4)..(4): phosphorylated serine
RRNSVFQQGMFFRKNLLRLTG

SEQ ID NO: 4978 - protein, 21 aa, Artificial Sequence
  Description of Artificial Sequence: Synthetic peptide
  MOD_RES (4)..(4): phosphorylated serine
RRNSVFQQGRFFRKNLLRLTG

SEQ ID NO: 4979 - protein, 21 aa, Artificial Sequence
  Description of Artificial Sequence: Synthetic peptide
  MOD_RES (4)..(4): phosphorylated serine
RRNSVFQQGYFFRKNLLRLTG

SEQ ID NO: 4980 - protein, 20 aa, Artificial Sequence
  Description of Artificial Sequence: Synthetic peptide
  MOD_RES (4)..(4): phosphorylated serine
RRPSIAPVLFFRKNLLRLTG

SEQ ID NO: 4981 - protein, 20 aa, Artificial Sequence
  Description of Artificial Sequence: Synthetic peptide
  MOD_RES (4)..(4): phosphorylated serine
RRPSLLSEFFFRKNLLRLTG

SEQ ID NO: 4982 - protein, 20 aa, Artificial Sequence
  Description of Artificial Sequence: Synthetic peptide
  MOD_RES (4)..(4): phosphorylated serine
RRPSLVHGFFFRKNLLRLTG

SEQ ID NO: 4983 - protein, 20 aa, Artificial Sequence
  Description of Artificial Sequence: Synthetic peptide
  MOD_RES (4)..(4): phosphorylated serine
RRPSLVHGKFFRKNLLRLTG

SEQ ID NO: 4984 - protein, 20 aa, Artificial Sequence
  Description of Artificial Sequence: Synthetic peptide
  MOD_RES (4)..(4): phosphorylated serine
RRPSLVHGLFFRKNLLRLTG

SEQ ID NO: 4985 - protein, 20 aa, Artificial Sequence
  Description of Artificial Sequence: Synthetic peptide
  MOD_RES (4)..(4): phosphorylated serine
RRPSLVHGMFFRKNLLRLTG

SEQ ID NO: 4986 - protein, 20 aa, Artificial Sequence
  Description of Artificial Sequence: Synthetic peptide
  MOD_RES (4)..(4): phosphorylated serine
RRPSLVHGRFFRKNLLRLTG

SEQ ID NO: 4987 - protein, 20 aa, Artificial Sequence
  Description of Artificial Sequence: Synthetic peptide
  MOD_RES (4)..(4): phosphorylated serine
RRPSLVHGYFFRKNLLRLTG

SEQ ID NO: 4988 - protein, 20 aa, Artificial Sequence
  Description of Artificial Sequence: Synthetic peptide
  MOD_RES (4)..(4): phosphorylated serine
RRPSVFERFFFRKNLLRLTG

SEQ ID NO: 4989 - protein, 20 aa, Artificial Sequence
  Description of Artificial Sequence: Synthetic peptide
  MOD_RES (4)..(4): phosphorylated serine
RRPSVFERKFFRKNLLRLTG

SEQ ID NO: 4990 - protein, 20 aa, Artificial Sequence
  Description of Artificial Sequence: Synthetic peptide
  MOD_RES (4)..(4): phosphorylated serine
RRPSVFERLFFRKNLLRLTG

SEQ ID NO: 4991 - protein, 20 aa, Artificial Sequence
  Description of Artificial Sequence: Synthetic peptide
  MOD_RES (4)..(4): phosphorylated serine
RRPSVFERMFFRKNLLRLTG

SEQ ID NO: 4992 - protein, 20 aa, Artificial Sequence
  Description of Artificial Sequence: Synthetic peptide
  MOD_RES (4)..(4): phosphorylated serine
RRPSVFERRFFRKNLLRLTG

SEQ ID NO: 4993 - protein, 20 aa, Artificial Sequence
  Description of Artificial Sequence: Synthetic peptide
  MOD_RES (4)..(4): phosphorylated serine
RRPSVFERYFFRKNLLRLTG

SEQ ID NO: 4994 - protein, 20 aa, Artificial Sequence
  Description of Artificial Sequence: Synthetic peptide
  MOD_RES (4)..(4): phosphorylated serine
RRPSYRKIFFFRKNLLRLTG

SEQ ID NO: 4995 - protein, 20 aa, Artificial Sequence
  Description of Artificial Sequence: Synthetic peptide
  MOD_RES (4)..(4): phosphorylated serine
RRPSYRKIKFFRKNLLRLTG

SEQ ID NO: 4996 - protein, 20 aa, Artificial Sequence
  Description of Artificial Sequence: Synthetic peptide
  MOD_RES (4)..(4): phosphorylated serine
RRPSYRKILFFRKNLLRLTG

SEQ ID NO: 4997 - protein, 20 aa, Artificial Sequence
  Description of Artificial Sequence: Synthetic peptide
  MOD_RES (4)..(4): phosphorylated serine
RRPSYRKIMFFRKNLLRLTG

SEQ ID NO: 4998 - protein, 20 aa, Artificial Sequence
  Description of Artificial Sequence: Synthetic peptide
  MOD_RES (4)..(4): phosphorylated serine
RRPSYRKIRFFRKNLLRLTG

SEQ ID NO: 4999 - protein, 20 aa, Artificial Sequence
  Description of Artificial Sequence: Synthetic peptide
  MOD_RES (4)..(4): phosphorylated serine
RRPSYRKIYFFRKNLLRLTG

SEQ ID NO: 5000 - protein, 20 aa, Artificial Sequence
  Description of Artificial Sequence: Synthetic peptide
  MOD_RES (4)..(4): phosphorylated serine
RRPSYTLGFFFRKNLLRLTG

SEQ ID NO: 5001 - protein, 20 aa, Artificial Sequence
  Description of Artificial Sequence: Synthetic peptide
  MOD_RES (4)..(4): phosphorylated serine
RRPSYTLGKFFRKNLLRLTG

SEQ ID NO: 5002 - protein, 20 aa, Artificial Sequence
  Description of Artificial Sequence: Synthetic peptide
  MOD_RES (4)..(4): phosphorylated serine
RRPSYTLGLFFRKNLLRLTG

SEQ ID NO: 5003 - protein, 20 aa, Artificial Sequence
  Description of Artificial Sequence: Synthetic peptide
  MOD_RES (4)..(4): phosphorylated serine
RRPSYTLGMFFRKNLLRLTG

SEQ ID NO: 5004 - protein, 20 aa, Artificial Sequence
  Description of Artificial Sequence: Synthetic peptide
  MOD_RES (4)..(4): phosphorylated serine
RRPSYTLGRFFRKNLLRLTG

SEQ ID NO: 5005 - protein, 20 aa, Artificial Sequence
  Description of Artificial Sequence: Synthetic peptide
  MOD_RES (4)..(4): phosphorylated serine
RRPSYTLGVFFRKNLLRLTG

SEQ ID NO: 5006 - protein, 20 aa, Artificial Sequence
  Description of Artificial Sequence: Synthetic peptide
  MOD_RES (4)..(4): phosphorylated serine
RRPSYTLGYFFRKNLLRLTG

SEQ ID NO: 5007 - protein, 20 aa, Artificial Sequence
  Description of Artificial Sequence: Synthetic peptide
  MOD_RES (4)..(4): phosphorylated serine
RRQSKVEALFFRKNLLRLTG

SEQ ID NO: 5008 - protein, 20 aa, Artificial Sequence
  Description of Artificial Sequence: Synthetic peptide
  MOD_RES (4)..(4): phosphorylated serine
RRRSLERLLFFRKNLLRLTG

SEQ ID NO: 5009 - protein, 19 aa, Artificial Sequence
  Description of Artificial Sequence: Synthetic peptide
  MOD_RES (3)..(3): phosphorylated serine
RRSFLVSYFFRKNLLRLTG

SEQ ID NO: 5010 - protein, 18 aa, Artificial Sequence
  Description of Artificial Sequence: Synthetic peptide
  MOD_RES (5)..(5): phosphorylated serine
RRSFSLEFFRKNLLRLTG

SEQ ID NO: 5011 - protein, 18 aa, Artificial Sequence
  Description of Artificial Sequence: Synthetic peptide
  MOD_RES (4)..(4): phosphorylated serine
RRSSFLQFFRKNLLRLTG

SEQ ID NO: 5012 - protein, 20 aa, Artificial Sequence
  Description of Artificial Sequence: Synthetic peptide
  MOD_RES (3)..(3): phosphorylated serine
  MOD_RES (4)..(4): phosphorylated serine
RRSSFLQLFFFRKNLLRLTG

SEQ ID NO: 5013 - protein, 20 aa, Artificial Sequence
  Description of Artificial Sequence: Synthetic peptide
  MOD_RES (3)..(3): phosphorylated serine
  MOD_RES (4)..(4): phosphorylated serine
RRSSFLQVFFFRKNLLRLTG

SEQ ID NO: 5014 - protein, 20 aa, Artificial Sequence
  Description of Artificial Sequence: Synthetic peptide
  MOD_RES (4)..(4): phosphorylated serine
RRSSFLQVFFFRKNLLRLTG

SEQ ID NO: 5015 - protein, 20 aa, Artificial Sequence
  Description of Artificial Sequence: Synthetic peptide
  MOD_RES (4)..(4): phosphorylated serine
RRSSFLQVKFFRKNLLRLTG

SEQ ID NO: 5016 - protein, 20 aa, Artificial Sequence
  Description of Artificial Sequence: Synthetic peptide
  MOD_RES (4)..(4): phosphorylated serine
RRSSFLQVLFFRKNLLRLTG

SEQ ID NO: 5017 - protein, 20 aa, Artificial Sequence
  Description of Artificial Sequence: Synthetic peptide
  MOD_RES (3)..(3): phosphorylated serine
  MOD_RES (4)..(4): phosphorylated serine
RRSSFLQVMFFRKNLLRLTG

SEQ ID NO: 5018 - protein, 20 aa, Artificial Sequence
  Description of Artificial Sequence: Synthetic peptide
  MOD_RES (4)..(4): phosphorylated serine
RRSSFLQVMFFRKNLLRLTG

SEQ ID NO: 5019 - protein, 20 aa, Artificial Sequence
  Description of Artificial Sequence: Synthetic peptide
  MOD_RES (4)..(4): phosphorylated serine
RRSSFLQVRFFRKNLLRLTG

SEQ ID NO: 5020 - protein, 20 aa, Artificial Sequence
  Description of Artificial Sequence: Synthetic peptide
  MOD_RES (3)..(3): phosphorylated serine
  MOD_RES (4)..(4): phosphorylated serine
RRSSFLQVVFFRKNLLRLTG

SEQ ID NO: 5021 - protein, 20 aa, Artificial Sequence
  Description of Artificial Sequence: Synthetic peptide
  MOD_RES (4)..(4): phosphorylated serine
RRSSFLQVYFFRKNLLRLTG

SEQ ID NO: 5022 - protein, 20 aa, Artificial Sequence
  Description of Artificial Sequence: Synthetic peptide
  MOD_RES (4)..(4): phosphorylated serine
RRSSIGLRFFFRKNLLRLTG

SEQ ID NO: 5023 - protein, 20 aa, Artificial Sequence
  Description of Artificial Sequence: Synthetic peptide
  MOD_RES (4)..(4): phosphorylated serine
RRSSIGLRKFFRKNLLRLTG

SEQ ID NO: 5024 - protein, 20 aa, Artificial Sequence
  Description of Artificial Sequence: Synthetic peptide
  MOD_RES (4)..(4): phosphorylated serine
RRSSIGLRLFFRKNLLRLTG

SEQ ID NO: 5025 - protein, 20 aa, Artificial Sequence
  Description of Artificial Sequence: Synthetic peptide
  MOD_RES (4)..(4): phosphorylated serine
RRSSIGLRMFFRKNLLRLTG

SEQ ID NO: 5026 - protein, 20 aa, Artificial Sequence
  Description of Artificial Sequence: Synthetic peptide
  MOD_RES (4)..(4): phosphorylated serine
RRSSIGLRRFFRKNLLRLTG

SEQ ID NO: 5027 - protein, 20 aa, Artificial Sequence
  Description of Artificial Sequence: Synthetic peptide
  MOD_RES (4)..(4): phosphorylated serine
RRSSIGLRVFFRKNLLRLTG

SEQ ID NO: 5028 - protein, 20 aa, Artificial Sequence
  Description of Artificial Sequence: Synthetic peptide
  MOD_RES (4)..(4): phosphorylated serine
RRSSIGLRYFFRKNLLRLTG

SEQ ID NO: 5029 - protein, 20 aa, Artificial Sequence
  Description of Artificial Sequence: Synthetic peptide
  MOD_RES (3)..(3): phosphorylated serine
RRSSIQSTFFFRKNLLRLTG

SEQ ID NO: 5030 - protein, 20 aa, Artificial Sequence
  Description of Artificial Sequence: Synthetic peptide
  MOD_RES (4)..(4): phosphorylated serine
RRSSIQSTFFFRKNLLRLTG

SEQ ID NO: 5031 - protein, 20 aa, Artificial Sequence
  Description of Artificial Sequence: Synthetic peptide
  MOD_RES (4)..(4): phosphorylated serine
RRSSIQSTKFFRKNLLRLTG

SEQ ID NO: 5032 - protein, 20 aa, Artificial Sequence
  Description of Artificial Sequence: Synthetic peptide
  MOD_RES (4)..(4): phosphorylated serine
RRSSIQSTLFFRKNLLRLTG

SEQ ID NO: 5033 - protein, 20 aa, Artificial Sequence
  Description of Artificial Sequence: Synthetic peptide
  MOD_RES (4)..(4): phosphorylated serine
RRSSIQSTMFFRKNLLRLTG

SEQ ID NO: 5034 - protein, 20 aa, Artificial Sequence
  Description of Artificial Sequence: Synthetic peptide
  MOD_RES (4)..(4): phosphorylated serine
RRSSIQSTRFFRKNLLRLTG

SEQ ID NO: 5035 - protein, 20 aa, Artificial Sequence
  Description of Artificial Sequence: Synthetic peptide
  MOD_RES (4)..(4): phosphorylated serine
RRSSIQSTYFFRKNLLRLTG

SEQ ID NO: 5036 - protein, 23 aa, Artificial Sequence
  Description of Artificial Sequence: Synthetic peptide
  MOD_RES (4)..(4): phosphorylated serine
RRSSLDAEIDSFFFRKNLLRLTG

SEQ ID NO: 5037 - protein, 23 aa, Artificial Sequence
  Description of Artificial Sequence: Synthetic peptide
  MOD_RES (4)..(4): phosphorylated serine
RRSSLDAEIDSLFFRKNLLRLTG

SEQ ID NO: 5038 - protein, 23 aa, Artificial Sequence
  Description of Artificial Sequence: Synthetic peptide
  MOD_RES (4)..(4): phosphorylated serine
RRSSLDAEIDSMFFRKNLLRLTG

SEQ ID NO: 5039 - protein, 23 aa, Artificial Sequence
  Description of Artificial Sequence: Synthetic peptide
  MOD_RES (4)..(4): phosphorylated serine
RRSSLDAEIDSVFFRKNLLRLTG

SEQ ID NO: 5040 - protein, 20 aa, Artificial Sequence
  Description of Artificial Sequence: Synthetic peptide
  MOD_RES (3)..(3): phosphorylated serine
RRSSQSWSFFFRKNLLRLTG

SEQ ID NO: 5041 - protein, 20 aa, Artificial Sequence
  Description of Artificial Sequence: Synthetic peptide
  MOD_RES (4)..(4): phosphorylated serine
RRSSQSWSFFFRKNLLRLTG

SEQ ID NO: 5042 - protein, 20 aa, Artificial Sequence
  Description of Artificial Sequence: Synthetic peptide
  MOD_RES (4)..(4): phosphorylated serine
RRSSQSWSKFFRKNLLRLTG

SEQ ID NO: 5043 - protein, 20 aa, Artificial Sequence
  Description of Artificial Sequence: Synthetic peptide
  MOD_RES (3)..(3): phosphorylated serine
RRSSQSWSLFFRKNLLRLTG

SEQ ID NO: 5044 - protein, 20 aa, Artificial Sequence
  Description of Artificial Sequence: Synthetic peptide
  MOD_RES (4)..(4): phosphorylated serine
RRSSQSWSLFFRKNLLRLTG

SEQ ID NO: 5045 - protein, 20 aa, Artificial Sequence
  Description of Artificial Sequence: Synthetic peptide
  MOD_RES (3)..(3): phosphorylated serine
RRSSQSWSMFFRKNLLRLTG

SEQ ID NO: 5046 - protein, 20 aa, Artificial Sequence
  Description of Artificial Sequence: Synthetic peptide
  MOD_RES (4)..(4): phosphorylated serine
RRSSQSWSMFFRKNLLRLTG

SEQ ID NO: 5047 - protein, 20 aa, Artificial Sequence
  Description of Artificial Sequence: Synthetic peptide
  MOD_RES (4)..(4): phosphorylated serine
RRSSQSWSRFFRKNLLRLTG

SEQ ID NO: 5048 - protein, 20 aa, Artificial Sequence
  Description of Artificial Sequence: Synthetic peptide
  MOD_RES (3)..(3): phosphorylated serine
RRSSQSWSVFFRKNLLRLTG

SEQ ID NO: 5049 - protein, 20 aa, Artificial Sequence
  Description of Artificial Sequence: Synthetic peptide
  MOD_RES (4)..(4): phosphorylated serine
RRSSQSWSYFFRKNLLRLTG

SEQ ID NO: 5050 - protein, 20 aa, Artificial Sequence
  Description of Artificial Sequence: Synthetic peptide
  MOD_RES (4)..(4): phosphorylated serine
RRSSSVAQVFFRKNLLRLTG

SEQ ID NO: 5051 - protein, 22 aa, Artificial Sequence
  Description of Artificial Sequence: Synthetic peptide
  MOD_RES (4)..(4): phosphorylated serine
RRSSTASLVKFFFRKNLLRLTG

SEQ ID NO: 5052 - protein, 22 aa, Artificial Sequence
  Description of Artificial Sequence: Synthetic peptide
  MOD_RES (4)..(4): phosphorylated serine
RRSSTASLVKKFFRKNLLRLTG

SEQ ID NO: 5053 - protein, 22 aa, Artificial Sequence
  Description of Artificial Sequence: Synthetic peptide
  MOD_RES (4)..(4): phosphorylated serine
RRSSTASLVKLFFRKNLLRLTG

SEQ ID NO: 5054 - protein, 22 aa, Artificial Sequence
  Description of Artificial Sequence: Synthetic peptide
  MOD_RES (4)..(4): phosphorylated serine
RRSSTASLVKMFFRKNLLRLTG

SEQ ID NO: 5055 - protein, 22 aa, Artificial Sequence
  Description of Artificial Sequence: Synthetic peptide
  MOD_RES (4)..(4): phosphorylated serine
RRSSTASLVKRFFRKNLLRLTG

SEQ ID NO: 5056 - protein, 20 aa, Artificial Sequence
  Description of Artificial Sequence: Synthetic peptide
  MOD_RES (3)..(3): phosphorylated serine
RRSSVDLGFFFRKNLLRLTG

SEQ ID NO: 5057 - protein, 20 aa, Artificial Sequence
  Description of Artificial Sequence: Synthetic peptide
  MOD_RES (4)..(4): phosphorylated serine
RRSSVDLGFFFRKNLLRLTG

SEQ ID NO: 5058 - protein, 20 aa, Artificial Sequence
  Description of Artificial Sequence: Synthetic peptide
  MOD_RES (3)..(3): phosphorylated serine
RRSSVDLGKFFRKNLLRLTG

SEQ ID NO: 5059 - protein, 20 aa, Artificial Sequence
  Description of Artificial Sequence: Synthetic peptide
  MOD_RES (4)..(4): phosphorylated serine
RRSSVDLGKFFRKNLLRLTG

SEQ ID NO: 5060 - protein, 20 aa, Artificial Sequence
  Description of Artificial Sequence: Synthetic peptide
  MOD_RES (3)..(3): phosphorylated serine
RRSSVDLGLFFRKNLLRLTG

SEQ ID NO: 5061 - protein, 20 aa, Artificial Sequence
  Description of Artificial Sequence: Synthetic peptide
  MOD_RES (4)..(4): phosphorylated serine
RRSSVDLGLFFRKNLLRLTG

SEQ ID NO: 5062 - protein, 20 aa, Artificial Sequence
  Description of Artificial Sequence: Synthetic peptide
  MOD_RES (3)..(3): phosphorylated serine
RRSSVDLGMFFRKNLLRLTG

SEQ ID NO: 5063 - protein, 20 aa, Artificial Sequence
  Description of Artificial Sequence: Synthetic peptide
  MOD_RES (4)..(4): phosphorylated serine
RRSSVDLGMFFRKNLLRLTG

SEQ ID NO: 5064 - protein, 20 aa, Artificial Sequence
  Description of Artificial Sequence: Synthetic peptide
  MOD_RES (3)..(3): phosphorylated serine
RRSSVDLGRFFRKNLLRLTG

SEQ ID NO: 5065 - protein, 20 aa, Artificial Sequence
  Description of Artificial Sequence: Synthetic peptide
  MOD_RES (4)..(4): phosphorylated serine
RRSSVDLGRFFRKNLLRLTG

SEQ ID NO: 5066 - protein, 20 aa, Artificial Sequence
  Description of Artificial Sequence: Synthetic peptide
  MOD_RES (3)..(3): phosphorylated serine
RRSSVDLGYFFRKNLLRLTG

SEQ ID NO: 5067 - protein, 20 aa, Artificial Sequence
  Description of Artificial Sequence: Synthetic peptide
  MOD_RES (4)..(4): phosphorylated serine
RRSSVDLGYFFRKNLLRLTG

SEQ ID NO: 5068 - protein, 20 aa, Artificial Sequence
  Description of Artificial Sequence: Synthetic peptide
  MOD_RES (4)..(4): phosphorylated serine
RRSSVKVEAFFRKNLLRLTG

SEQ ID NO: 5069 - protein, 20 aa, Artificial Sequence
  Description of Artificial Sequence: Synthetic peptide
  MOD_RES (4)..(4): phosphorylated serine
RRSSVKVEFFFRKNLLRLTG

SEQ ID NO: 5070 - protein, 20 aa, Artificial Sequence
  Description of Artificial Sequence: Synthetic peptide
  MOD_RES (4)..(4): phosphorylated serine
RRSSVKVEKFFRKNLLRLTG

SEQ ID NO: 5071 - protein, 20 aa, Artificial Sequence
  Description of Artificial Sequence: Synthetic peptide
  MOD_RES (4)..(4): phosphorylated serine
RRSSVKVELFFRKNLLRLTG

SEQ ID NO: 5072 - protein, 20 aa, Artificial Sequence
  Description of Artificial Sequence: Synthetic peptide
  MOD_RES (4)..(4): phosphorylated serine
RRSSVKVEMFFRKNLLRLTG

SEQ ID NO: 5073 - protein, 20 aa, Artificial Sequence
  Description of Artificial Sequence: Synthetic peptide
  MOD_RES (4)..(4): phosphorylated serine
RRSSVKVERFFRKNLLRLTG

SEQ ID NO: 5074 - protein, 20 aa, Artificial Sequence
  Description of Artificial Sequence: Synthetic peptide
  MOD_RES (4)..(4): phosphorylated serine
RRSSVKVEYFFRKNLLRLTG

SEQ ID NO: 5075 - protein, 20 aa, Artificial Sequence
  Description of Artificial Sequence: Synthetic peptide
  MOD_RES (4)..(4): phosphorylated serine
RRTSPITRFFFRKNLLRLTG

SEQ ID NO: 5076 - protein, 20 aa, Artificial Sequence
  Description of Artificial Sequence: Synthetic peptide
  MOD_RES (4)..(4): phosphorylated serine
RRTSPITRKFFRKNLLRLTG

SEQ ID NO: 5077 - protein, 20 aa, Artificial Sequence
  Description of Artificial Sequence: Synthetic peptide
  MOD_RES (4)..(4): phosphorylated serine
RRTSPITRLFFRKNLLRLTG

SEQ ID NO: 5078 - protein, 20 aa, Artificial Sequence
  Description of Artificial Sequence: Synthetic peptide
  MOD_RES (4)..(4): phosphorylated serine
RRTSPITRMFFRKNLLRLTG

SEQ ID NO: 5079 - protein, 20 aa, Artificial Sequence
  Description of Artificial Sequence: Synthetic peptide
  MOD_RES (4)..(4): phosphorylated serine
RRTSPITRRFFRKNLLRLTG

SEQ ID NO: 5080 - protein, 20 aa, Artificial Sequence
  Description of Artificial Sequence: Synthetic peptide
  MOD_RES (8)..(8): phosphorylated serine
RRVVQRSSFFFRKNLLRLTG

SEQ ID NO: 5081 - protein, 20 aa, Artificial Sequence
  Description of Artificial Sequence: Synthetic peptide
  MOD_RES (8)..(8): phosphorylated serine
RRVVQRSSKFFRKNLLRLTG

SEQ ID NO: 5082 - protein, 20 aa, Artificial Sequence
  Description of Artificial Sequence: Synthetic peptide
  MOD_RES (8)..(8): phosphorylated serine
RRVVQRSSLFFRKNLLRLTG

SEQ ID NO: 5083 - protein, 20 aa, Artificial Sequence
  Description of Artificial Sequence: Synthetic peptide
  MOD_RES (8)..(8): phosphorylated serine
RRVVQRSSMFFRKNLLRLTG

SEQ ID NO: 5084 - protein, 20 aa, Artificial Sequence
  Description of Artificial Sequence: Synthetic peptide
  MOD_RES (8)..(8): phosphorylated serine
RRVVQRSSRFFRKNLLRLTG

SEQ ID NO: 5085 - protein, 20 aa, Artificial Sequence
  Description of Artificial Sequence: Synthetic peptide
  MOD_RES (8)..(8): phosphorylated serine
RRVVQRSSYFFRKNLLRLTG

SEQ ID NO: 5086 - protein, 19 aa, Artificial Sequence
  Description of Artificial Sequence: Synthetic peptide
  MOD_RES (7)..(7): phosphorylated serine
RRWQRSSLFFRKNLLRLTG

SEQ ID NO: 5087 - protein, 20 aa, Artificial Sequence
  Description of Artificial Sequence: Synthetic peptide
  MOD_RES (4)..(4): phosphorylated serine
RRYSGKTEFFFRKNLLRLTG

SEQ ID NO: 5088 - protein, 20 aa, Artificial Sequence
  Description of Artificial Sequence: Synthetic peptide
  MOD_RES (4)..(4): phosphorylated serine
RRYSGKTEKFFRKNLLRLTG

SEQ ID NO: 5089 - protein, 20 aa, Artificial Sequence
  Description of Artificial Sequence: Synthetic peptide
  MOD_RES (4)..(4): phosphorylated serine
RRYSGKTELFFRKNLLRLTG

SEQ ID NO: 5090 - protein, 20 aa, Artificial Sequence
  Description of Artificial Sequence: Synthetic peptide
  MOD_RES (4)..(4): phosphorylated serine
RRYSGKTERFFRKNLLRLTG

SEQ ID NO: 5091 - protein, 20 aa, Artificial Sequence
  Description of Artificial Sequence: Synthetic peptide
  MOD_RES (4)..(4): phosphorylated serine
RRYSGKTEYFFRKNLLRLTG

SEQ ID NO: 5092 - protein, 20 aa, Artificial Sequence
  Description of Artificial Sequence: Synthetic peptide
  MOD_RES (4)..(4): phosphorylated serine
RRYSGNMEFFFRKNLLRLTG

SEQ ID NO: 5093 - protein, 20 aa, Artificial Sequence
  Description of Artificial Sequence: Synthetic peptide
  MOD_RES (4)..(4): phosphorylated serine
RRYSGNMEKFFRKNLLRLTG

SEQ ID NO: 5094 - protein, 20 aa, Artificial Sequence
  Description of Artificial Sequence: Synthetic peptide
  MOD_RES (4)..(4): phosphorylated serine
RRYSGNMELFFRKNLLRLTG

SEQ ID NO: 5095 - protein, 20 aa, Artificial Sequence
  Description of Artificial Sequence: Synthetic peptide
  MOD_RES (4)..(4): phosphorylated serine
RRYSGNMEMFFRKNLLRLTG

SEQ ID NO: 5096 - protein, 20 aa, Artificial Sequence
  Description of Artificial Sequence: Synthetic peptide
  MOD_RES (4)..(4): phosphorylated serine
RRYSGNMERFFRKNLLRLTG

SEQ ID NO: 5097 - protein, 20 aa, Artificial Sequence
  Description of Artificial Sequence: Synthetic peptide
  MOD_RES (4)..(4): phosphorylated serine
RRYSKFFDLFFRKNLLRLTG

SEQ ID NO: 5098 - protein, 20 aa, Artificial Sequence
  Description of Artificial Sequence: Synthetic peptide
  MOD_RES (4)..(4): phosphorylated serine
RRYSPPIERFFRKNLLRLTG

SEQ ID NO: 5099 - protein, 19 aa, Artificial Sequence
  Description of Artificial Sequence: Synthetic peptide
  MOD_RES (4)..(4): phosphorylated serine
RRYSPPIQFFRKNLLRLTG

SEQ ID NO: 5100 - protein, 20 aa, Artificial Sequence
  Description of Artificial Sequence: Synthetic peptide
  MOD_RES (4)..(4): phosphorylated serine
RRYSPPIQFFFRKNLLRLTG

SEQ ID NO: 5101 - protein, 20 aa, Artificial Sequence
  Description of Artificial Sequence: Synthetic peptide
  MOD_RES (4)..(4): phosphorylated serine
RRYSPPIQKFFRKNLLRLTG

SEQ ID NO: 5102 - protein, 20 aa, Artificial Sequence
  Description of Artificial Sequence: Synthetic peptide
  MOD_RES (4)..(4): phosphorylated serine
RRYSPPIQLFFRKNLLRLTG

SEQ ID NO: 5103 - protein, 20 aa, Artificial Sequence
  Description of Artificial Sequence: Synthetic peptide
  MOD_RES (4)..(4): phosphorylated serine
RRYSPPIQMFFRKNLLRLTG

SEQ ID NO: 5104 - protein, 20 aa, Artificial Sequence
  Description of Artificial Sequence: Synthetic peptide
  MOD_RES (4)..(4): phosphorylated serine
RRYSPPIQRFFRKNLLRLTG

SEQ ID NO: 5105 - protein, 20 aa, Artificial Sequence
  Description of Artificial Sequence: Synthetic peptide
  MOD_RES (4)..(4): phosphorylated serine
RRYSPPIQYFFRKNLLRLTG

SEQ ID NO: 5106 - protein, 21 aa, Artificial Sequence
  Description of Artificial Sequence: Synthetic peptide
  MOD_RES (4)..(4): phosphorylated serine
  MOD_RES (6)..(6): phosphorylated serine
RRYSRSPYSFFFRKNLLRLTG

SEQ ID NO: 5107 - protein, 21 aa, Artificial Sequence
  Description of Artificial Sequence: Synthetic peptide
  MOD_RES (4)..(4): phosphorylated serine
RRYSRSPYSFFFRKNLLRLTG

SEQ ID NO: 5108 - protein, 21 aa, Artificial Sequence
  Description of Artificial Sequence: Synthetic peptide
  MOD_RES (6)..(6): phosphorylated serine
RRYSRSPYSFFFRKNLLRLTG

SEQ ID NO: 5109 - protein, 21 aa, Artificial Sequence
  Description of Artificial Sequence: Synthetic peptide
  MOD_RES (4)..(4): phosphorylated serine
  MOD_RES (6)..(6): phosphorylated serine
RRYSRSPYSKFFRKNLLRLTG

SEQ ID NO: 5110 - protein, 21 aa, Artificial Sequence
  Description of Artificial Sequence: Synthetic peptide
  MOD_RES (4)..(4): phosphorylated serine
RRYSRSPYSKFFRKNLLRLTG

SEQ ID NO: 5111 - protein, 21 aa, Artificial Sequence
  Description of Artificial Sequence: Synthetic peptide
  MOD_RES (6)..(6): phosphorylated serine
RRYSRSPYSKFFRKNLLRLTG

SEQ ID NO: 5112 - protein, 21 aa, Artificial Sequence
  Description of Artificial Sequence: Synthetic peptide
  MOD_RES (4)..(4): phosphorylated serine
  MOD_RES (6)..(6): phosphorylated serine
RRYSRSPYSLFFRKNLLRLTG

SEQ ID NO: 5113 - protein, 21 aa, Artificial Sequence
  Description of Artificial Sequence: Synthetic peptide
  MOD_RES (4)..(4): phosphorylated serine
RRYSRSPYSLFFRKNLLRLTG

SEQ ID NO: 5114 - protein, 21 aa, Artificial Sequence
  Description of Artificial Sequence: Synthetic peptide
  MOD_RES (6)..(6): phosphorylated serine
RRYSRSPYSLFFRKNLLRLTG

SEQ ID NO: 5115 - protein, 21 aa, Artificial Sequence
  Description of Artificial Sequence: Synthetic peptide
  MOD_RES (4)..(4): phosphorylated serine
  MOD_RES (6)..(6): phosphorylated serine
RRYSRSPYSMFFRKNLLRLTG

SEQ ID NO: 5116 - protein, 21 aa, Artificial Sequence
  Description of Artificial Sequence: Synthetic peptide
  MOD_RES (4)..(4): phosphorylated serine
RRYSRSPYSMFFRKNLLRLTG

SEQ ID NO: 5117 - protein, 21 aa, Artificial Sequence
  Description of Artificial Sequence: Synthetic peptide
  MOD_RES (6)..(6): phosphorylated serine
RRYSRSPYSMFFRKNLLRLTG

SEQ ID NO: 5118 - protein, 21 aa, Artificial Sequence
  Description of Artificial Sequence: Synthetic peptide
  MOD_RES (4)..(4): phosphorylated serine
  MOD_RES (6)..(6): phosphorylated serine
RRYSRSPYSRFFRKNLLRLTG

SEQ ID NO: 5119 - protein, 21 aa, Artificial Sequence
  Description of Artificial Sequence: Synthetic peptide
  MOD_RES (4)..(4): phosphorylated serine
RRYSRSPYSRFFRKNLLRLTG

SEQ ID NO: 5120 - protein, 21 aa, Artificial Sequence
  Description of Artificial Sequence: Synthetic peptide
  MOD_RES (6)..(6): phosphorylated serine
RRYSRSPYSRFFRKNLLRLTG

SEQ ID NO: 5121 - protein, 21 aa, Artificial Sequence
  Description of Artificial Sequence: Synthetic peptide
  MOD_RES (4)..(4): phosphorylated threonine
RRYTNRVVTKFFRKNLLRLTG

SEQ ID NO: 5122 - protein, 21 aa, Artificial Sequence
  Description of Artificial Sequence: Synthetic peptide
  MOD_RES (4)..(4): phosphorylated threonine
RRYTNRVVTLFFRKNLLRLTG

SEQ ID NO: 5123 - protein, 21 aa, Artificial Sequence
  Description of Artificial Sequence: Synthetic peptide
  MOD_RES (4)..(4): phosphorylated threonine
RRYTNRVVTMFFRKNLLRLTG

SEQ ID NO: 5124 - protein, 21 aa, Artificial Sequence
  Description of Artificial Sequence: Synthetic peptide
  MOD_RES (4)..(4): phosphorylated threonine
RRYTNRVVTRFFRKNLLRLTG

SEQ ID NO: 5125 - protein, 20 aa, Artificial Sequence
  Description of Artificial Sequence: Synthetic peptide
  MOD_RES (4)..(4): phosphorylated serine
RSASFSRKVFFRKNLLRLTG

SEQ ID NO: 5126 - protein, 24 aa, Artificial Sequence
  Description of Artificial Sequence: Synthetic peptide
  MOD_RES (4)..(4): phosphorylated serine
RSASPDDDLGSSNFFRKNLLRLTG

SEQ ID NO: 5127 - protein, 22 aa, Artificial Sequence
  Description of Artificial Sequence: Synthetic peptide
  MOD_RES (4)..(4): phosphorylated serine
RSASSATQVHKFFRKNLLRLTG

SEQ ID NO: 5128 - protein, 22 aa, Artificial Sequence
  Description of Artificial Sequence: Synthetic peptide
  MOD_RES (4)..(4): phosphorylated serine
RSASSATQVHYFFRKNLLRLTG

SEQ ID NO: 5129 - protein, 24 aa, Artificial Sequence
  Description of Artificial Sequence: Synthetic peptide
  MOD_RES (7)..(7): phosphorylated serine
RSDPSKSPGSLRYFFRKNLLRLTG

SEQ ID NO: 5130 - protein, 20 aa, Artificial Sequence
  Description of Artificial Sequence: Synthetic peptide
  MOD_RES (4)..(4): phosphorylated serine
RSDSPKIDLFFRKNLLRLTG

SEQ ID NO: 5131 - protein, 20 aa, Artificial Sequence
  Description of Artificial Sequence: Synthetic peptide
  MOD_RES (4)..(4): phosphorylated serine
RSDSPKIDYFFRKNLLRLTG

SEQ ID NO: 5132 - protein, 20 aa, Artificial Sequence
  Description of Artificial Sequence: Synthetic peptide
  MOD_RES (4)..(4): phosphorylated serine
RSDSRAQAVFFRKNLLRLTG

SEQ ID NO: 5133 - protein, 20 aa, Artificial Sequence
  Description of Artificial Sequence: Synthetic peptide
  MOD_RES (4)..(4): phosphorylated serine
RSDSRAQAYFFRKNLLRLTG

SEQ ID NO: 5134 - protein, 20 aa, Artificial Sequence
  Description of Artificial Sequence: Synthetic peptide
  MOD_RES (4)..(4): phosphorylated serine
RSDSVGENLFFRKNLLRLTG

SEQ ID NO: 5135 - protein, 20 aa, Artificial Sequence
  Description of Artificial Sequence: Synthetic peptide
  MOD_RES (4)..(4): phosphorylated serine
RSDSVGENYFFRKNLLRLTG

SEQ ID NO: 5136 - protein, 19 aa, Artificial Sequence
  Description of Artificial Sequence: Synthetic peptide
  MOD_RES (4)..(4): phosphorylated serine
RSDSYVELFFRKNLLRLTG

SEQ ID NO: 5137 - protein, 22 aa, Artificial Sequence
  Description of Artificial Sequence: Synthetic peptide
  MOD_RES (4)..(4): phosphorylated serine
RSDSYVELSQYFFRKNLLRLTG

SEQ ID NO: 5138 - protein, 24 aa, Artificial Sequence
  Description of Artificial Sequence: Synthetic peptide
  MOD_RES (7)..(7): phosphorylated serine
RSEPSKSPGSLRYFFRKNLLRLTG

SEQ ID NO: 5139 - protein, 20 aa, Artificial Sequence
  Description of Artificial Sequence: Synthetic peptide
  MOD_RES (4)..(4): phosphorylated serine
RSESKDRKFFFRKNLLRLTG

SEQ ID NO: 5140 - protein, 20 aa, Artificial Sequence
  Description of Artificial Sequence: Synthetic peptide
  MOD_RES (4)..(4): phosphorylated serine
RSESKDRKLFFRKNLLRLTG

SEQ ID NO: 5141 - protein, 20 aa, Artificial Sequence
  Description of Artificial Sequence: Synthetic peptide
  MOD_RES (4)..(4): phosphorylated serine
RSESKDRKMFFRKNLLRLTG

SEQ ID NO: 5142 - protein, 20 aa, Artificial Sequence
  Description of Artificial Sequence: Synthetic peptide
  MOD_RES (4)..(4): phosphorylated serine
RSESKDRKVFFRKNLLRLTG

SEQ ID NO: 5143 - protein, 20 aa, Artificial Sequence
  Description of Artificial Sequence: Synthetic peptide
  MOD_RES (4)..(4): phosphorylated serine
RSESPKIDLFFRKNLLRLTG

SEQ ID NO: 5144 - protein, 20 aa, Artificial Sequence
  Description of Artificial Sequence: Synthetic peptide
  MOD_RES (4)..(4): phosphorylated serine
RSESPKIDYFFRKNLLRLTG

SEQ ID NO: 5145 - protein, 20 aa, Artificial Sequence
  Description of Artificial Sequence: Synthetic peptide
  MOD_RES (4)..(4): phosphorylated serine
RSESPPAELFFRKNLLRLTG

SEQ ID NO: 5146 - protein, 20 aa, Artificial Sequence
  Description of Artificial Sequence: Synthetic peptide
  MOD_RES (4)..(4): phosphorylated serine
RSESRAQAVFFRKNLLRLTG

SEQ ID NO: 5147 - protein, 20 aa, Artificial Sequence
  Description of Artificial Sequence: Synthetic peptide
  MOD_RES (4)..(4): phosphorylated serine
RSESRAQAYFFRKNLLRLTG

SEQ ID NO: 5148 - protein, 20 aa, Artificial Sequence
  Description of Artificial Sequence: Synthetic peptide
  MOD_RES (4)..(4): phosphorylated serine
RSESVGENLFFRKNLLRLTG

SEQ ID NO: 5149 - protein, 20 aa, Artificial Sequence
  Description of Artificial Sequence: Synthetic peptide
  MOD_RES (4)..(4): phosphorylated serine
RSESVGENYFFRKNLLRLTG

SEQ ID NO: 5150 - protein, 22 aa, Artificial Sequence
  Description of Artificial Sequence: Synthetic peptide
  MOD_RES (4)..(4): phosphorylated serine
RSESYVELSQYFFRKNLLRLTG

SEQ ID NO: 5151 - protein, 20 aa, Artificial Sequence
  Description of Artificial Sequence: Synthetic peptide
  MOD_RES (4)..(4): phosphorylated serine
RSFSPTMKVFFRKNLLRLTG

SEQ ID NO: 5152 - protein, 20 aa, Artificial Sequence
  Description of Artificial Sequence: Synthetic peptide
  MOD_RES (4)..(4): phosphorylated serine
RSGSLERKFFFRKNLLRLTG

SEQ ID NO: 5153 - protein, 20 aa, Artificial Sequence
  Description of Artificial Sequence: Synthetic peptide
  MOD_RES (4)..(4): phosphorylated serine
RSGSLERKLFFRKNLLRLTG

SEQ ID NO: 5154 - protein, 20 aa, Artificial Sequence
  Description of Artificial Sequence: Synthetic peptide
  MOD_RES (4)..(4): phosphorylated serine
RSGSLERKMFFRKNLLRLTG

SEQ ID NO: 5155 - protein, 20 aa, Artificial Sequence
  Description of Artificial Sequence: Synthetic peptide
  MOD_RES (4)..(4): phosphorylated serine
RSGSLERKVFFRKNLLRLTG

SEQ ID NO: 5156 - protein, 20 aa, Artificial Sequence
  Description of Artificial Sequence: Synthetic peptide
  MOD_RES (5)..(5): phosphorylated serine
RSHSSPASLFFRKNLLRLTG

SEQ ID NO: 5157 - protein, 20 aa, Artificial Sequence
  Description of Artificial Sequence: Synthetic peptide
  MOD_RES (4)..(4): phosphorylated serine
RSISVGENLFFRKNLLRLTG

SEQ ID NO: 5158 - protein, 20 aa, Artificial Sequence
  Description of Artificial Sequence: Synthetic peptide
  MOD_RES (4)..(4): phosphorylated serine
RSLSESYELFFRKNLLRLTG

SEQ ID NO: 5159 - protein, 20 aa, Artificial Sequence
  Description of Artificial Sequence: Synthetic peptide
  MOD_RES (4)..(4): phosphorylated serine
RSLSPGGAAFFRKNLLRLTG

SEQ ID NO: 5160 - protein, 20 aa, Artificial Sequence
  Description of Artificial Sequence: Synthetic peptide
  MOD_RES (4)..(4): phosphorylated serine
RSLSPGGAFFFRKNLLRLTG

SEQ ID NO: 5161 - protein, 20 aa, Artificial Sequence
  Description of Artificial Sequence: Synthetic peptide
  MOD_RES (4)..(4): phosphorylated serine
RSLSPGGALFFRKNLLRLTG

SEQ ID NO: 5162 - protein, 20 aa, Artificial Sequence
  Description of Artificial Sequence: Synthetic peptide
  MOD_RES (4)..(4): phosphorylated serine
RSLSPGGAMFFRKNLLRLTG

SEQ ID NO: 5163 - protein, 20 aa, Artificial Sequence
  Description of Artificial Sequence: Synthetic peptide
  MOD_RES (4)..(4): phosphorylated serine
RSLSPGGAVFFRKNLLRLTG

SEQ ID NO: 5164 - protein, 19 aa, Artificial Sequence
  Description of Artificial Sequence: Synthetic peptide
  MOD_RES (4)..(4): phosphorylated serine
RSLSPLLFFFRKNLLRLTG

SEQ ID NO: 5165 - protein, 19 aa, Artificial Sequence
  Description of Artificial Sequence: Synthetic peptide
  MOD_RES (4)..(4): phosphorylated serine
RSLSPLLLFFRKNLLRLTG

SEQ ID NO: 5166 - protein, 19 aa, Artificial Sequence
  Description of Artificial Sequence: Synthetic peptide
  MOD_RES (4)..(4): phosphorylated serine
RSLSPLLMFFRKNLLRLTG

SEQ ID NO: 5167 - protein, 19 aa, Artificial Sequence
  Description of Artificial Sequence: Synthetic peptide
  MOD_RES (4)..(4): phosphorylated serine
RSLSPLLVFFRKNLLRLTG

SEQ ID NO: 5168 - protein, 21 aa, Artificial Sequence
  Description of Artificial Sequence: Synthetic peptide
  MOD_RES (4)..(4): phosphorylated serine
RSLSQELVGVFFRKNLLRLTG

SEQ ID NO: 5169 - protein, 20 aa, Artificial Sequence
  Description of Artificial Sequence: Synthetic peptide
  MOD_RES (4)..(4): phosphorylated serine
RSLSVEIVKFFRKNLLRLTG

SEQ ID NO: 5170 - protein, 20 aa, Artificial Sequence
  Description of Artificial Sequence: Synthetic peptide
  MOD_RES (4)..(4): phosphorylated serine
RSLSVEIVYFFRKNLLRLTG

SEQ ID NO: 5171 - protein, 20 aa, Artificial Sequence
  Description of Artificial Sequence: Synthetic peptide
  MOD_RES (4)..(4): phosphorylated serine
RSMSMPVAHFFRKNLLRLTG

SEQ ID NO: 5172 - protein, 20 aa, Artificial Sequence
  Description of Artificial Sequence: Synthetic peptide
  MOD_RES (4)..(4): phosphorylated serine
RSMSMPVAKFFRKNLLRLTG

SEQ ID NO: 5173 - protein, 29 aa, Artificial Sequence
  Description of Artificial Sequence: Synthetic peptide
  MOD_RES (2)..(2): phosphorylated serine
RSPEDEYELLMPHRISSHFFRKNLLRLTG

SEQ ID NO: 5174 - protein, 20 aa, Artificial Sequence
  Description of Artificial Sequence: Synthetic peptide
  MOD_RES (5)..(5): phosphorylated serine
RSRRSPLLKFFRKNLLRLTG

SEQ ID NO: 5175 - protein, 20 aa, Artificial Sequence
  Description of Artificial Sequence: Synthetic peptide
  MOD_RES (5)..(5): phosphorylated serine
RSRRSPLLYFFRKNLLRLTG

SEQ ID NO: 5176 - protein, 19 aa, Artificial Sequence
  Description of Artificial Sequence: Synthetic peptide
  MOD_RES (4)..(4): phosphorylated serine
RSRSPLELFFRKNLLRLTG

SEQ ID NO: 5177 - protein, 21 aa, Artificial Sequence
  Description of Artificial Sequence: Synthetic peptide
  MOD_RES (4)..(4): phosphorylated serine
RSRSPPPVSKFFRKNLLRLTG

SEQ ID NO: 5178 - protein, 21 aa, Artificial Sequence
  Description of Artificial Sequence: Synthetic peptide
  MOD_RES (4)..(4): phosphorylated serine
RSRSPPPVSYFFRKNLLRLTG

SEQ ID NO: 5179 - protein, 20 aa, Artificial Sequence
  Description of Artificial Sequence: Synthetic peptide
  MOD_RES (4)..(4): phosphorylated serine
RSRSPRPAFFFRKNLLRLTG

SEQ ID NO: 5180 - protein, 20 aa, Artificial Sequence
  Description of Artificial Sequence: Synthetic peptide
  MOD_RES (4)..(4): phosphorylated serine
RSRSPRPAIFFRKNLLRLTG

SEQ ID NO: 5181 - protein, 20 aa, Artificial Sequence
  Description of Artificial Sequence: Synthetic peptide
  MOD_RES (4)..(4): phosphorylated serine
RSRSPRPALFFRKNLLRLTG

SEQ ID NO: 5182 - protein, 20 aa, Artificial Sequence
  Description of Artificial Sequence: Synthetic peptide
  MOD_RES (4)..(4): phosphorylated serine
RSRSPRPAMFFRKNLLRLTG

SEQ ID NO: 5183 - protein, 20 aa, Artificial Sequence
  Description of Artificial Sequence: Synthetic peptide
  MOD_RES (4)..(4): phosphorylated serine
RSRSPRPAVFFRKNLLRLTG

SEQ ID NO: 5184 - protein, 20 aa, Artificial Sequence
  Description of Artificial Sequence: Synthetic peptide
  MOD_RES (4)..(4): phosphorylated serine
  MOD_RES (9)..(9): Any amino acid
RSRSPRPAXFFRKNLLRLTG

SEQ ID NO: 5185 - protein, 21 aa, Artificial Sequence
  Description of Artificial Sequence: Synthetic peptide
  MOD_RES (5)..(5): phosphorylated serine
RSRTSPITRRFFRKNLLRLTG

SEQ ID NO: 5186 - protein, 21 aa, Artificial Sequence
  Description of Artificial Sequence: Synthetic peptide
  MOD_RES (5)..(5): phosphorylated serine
RSRTSPITRYFFRKNLLRLTG

SEQ ID NO: 5187 - protein, 20 aa, Artificial Sequence
  Description of Artificial Sequence: Synthetic peptide
  MOD_RES (4)..(4): phosphorylated serine
RSSSLIRHKFFRKNLLRLTG

SEQ ID NO: 5188 - protein, 20 aa, Artificial Sequence
  Description of Artificial Sequence: Synthetic peptide
  MOD_RES (4)..(4): phosphorylated serine
RSSSLIRHYFFRKNLLRLTG

SEQ ID NO: 5189 - protein, 20 aa, Artificial Sequence
  Description of Artificial Sequence: Synthetic peptide
  MOD_RES (4)..(4): phosphorylated serine
RSVSLSMRKFFRKNLLRLTG

SEQ ID NO: 5190 - protein, 20 aa, Artificial Sequence
  Description of Artificial Sequence: Synthetic peptide
  MOD_RES (4)..(4): phosphorylated serine
RSVSLSMRYFFRKNLLRLTG

SEQ ID NO: 5191 - protein, 25 aa, Artificial Sequence
  Description of Artificial Sequence: Synthetic peptide
  MOD_RES (2)..(2): phosphorylated serine
RSWKYNQSISLRRPFFRKNLLRLTG

SEQ ID NO: 5192 - protein, 20 aa, Artificial Sequence
  Description of Artificial Sequence: Synthetic peptide
  MOD_RES (4)..(4): phosphorylated serine
  MOD_RES (8)..(8): phosphorylated serine
RSYSGSRSKFFRKNLLRLTG

SEQ ID NO: 5193 - protein, 20 aa, Artificial Sequence
  Description of Artificial Sequence: Synthetic peptide
  MOD_RES (4)..(4): phosphorylated serine
  MOD_RES (8)..(8): phosphorylated serine
RSYSGSRSRFFRKNLLRLTG

SEQ ID NO: 5194 - protein, 20 aa, Artificial Sequence
  Description of Artificial Sequence: Synthetic peptide
  MOD_RES (4)..(4): phosphorylated serine
  MOD_RES (8)..(8): phosphorylated serine
RSYSGSRSYFFRKNLLRLTG

SEQ ID NO: 5195 - protein, 21 aa, Artificial Sequence
  Description of Artificial Sequence: Synthetic peptide
  MOD_RES (4)..(4): phosphorylated serine
RSYSPDHRQKFFRKNLLRLTG

SEQ ID NO: 5196 - protein, 21 aa, Artificial Sequence
  Description of Artificial Sequence: Synthetic peptide
  MOD_RES (4)..(4): phosphorylated serine
RSYSPDHRQYFFRKNLLRLTG

SEQ ID NO: 5197 - protein, 20 aa, Artificial Sequence
  Description of Artificial Sequence: Synthetic peptide
  MOD_RES (4)..(4): phosphorylated serine
RSYSPERSKFFRKNLLRLTG

SEQ ID NO: 5198 - protein, 20 aa, Artificial Sequence
  Description of Artificial Sequence: Synthetic peptide
  MOD_RES (4)..(4): phosphorylated serine
RSYSPERSYFFRKNLLRLTG

SEQ ID NO: 5199 - protein, 20 aa, Artificial Sequence
  Description of Artificial Sequence: Synthetic peptide
  MOD_RES (4)..(4): phosphorylated serine
RSYSPRNSRFFRKNLLRLTG

SEQ ID NO: 5200 - protein, 20 aa, Artificial Sequence
  Description of Artificial Sequence: Synthetic peptide
  MOD_RES (4)..(4): phosphorylated serine
RSYSPRNSYFFRKNLLRLTG

SEQ ID NO: 5201 - protein, 20 aa, Artificial Sequence
  Description of Artificial Sequence: Synthetic peptide
  MOD_RES (6)..(6): phosphorylated serine
RSYSRSFSKFFRKNLLRLTG

SEQ ID NO: 5202 - protein, 20 aa, Artificial Sequence
  Description of Artificial Sequence: Synthetic peptide
  MOD_RES (4)..(4): phosphorylated serine
RSYSRSFSRFFRKNLLRLTG

SEQ ID NO: 5203 - protein, 20 aa, Artificial Sequence
  Description of Artificial Sequence: Synthetic peptide
  MOD_RES (6)..(6): phosphorylated serine
RSYSRSFSRFFRKNLLRLTG

SEQ ID NO: 5204 - protein, 20 aa, Artificial Sequence
  Description of Artificial Sequence: Synthetic peptide
  MOD_RES (6)..(6): phosphorylated serine
RSYSRSFSYFFRKNLLRLTG

SEQ ID NO: 5205 - protein, 20 aa, Artificial Sequence
  Description of Artificial Sequence: Synthetic peptide
  MOD_RES (4)..(4): phosphorylated serine
RSYSYPRQKFFRKNLLRLTG

SEQ ID NO: 5206 - protein, 20 aa, Artificial Sequence
  Description of Artificial Sequence: Synthetic peptide
  MOD_RES (4)..(4): phosphorylated serine
RSYSYPRQYFFRKNLLRLTG

SEQ ID NO: 5207 - protein, 25 aa, Artificial Sequence
  Description of Artificial Sequence: Synthetic peptide
  MOD_RES (12)..(12): phosphorylated serine
RSYVTTSTRTYSLGFFRKNLLRLTG

SEQ ID NO: 5208 - protein, 20 aa, Artificial Sequence
  Description of Artificial Sequence: Synthetic peptide
  MOD_RES (4)..(4): phosphorylated serine
RTASFAVRKFFRKNLLRLTG

SEQ ID NO: 5209 - protein, 20 aa, Artificial Sequence
  Description of Artificial Sequence: Synthetic peptide
  MOD_RES (4)..(4): phosphorylated serine
RTASFAVRYFFRKNLLRLTG

SEQ ID NO: 5210 - protein, 20 aa, Artificial Sequence
  Description of Artificial Sequence: Synthetic peptide
  MOD_RES (4)..(4): phosphorylated serine
RTASLIIKVFFRKNLLRLTG

SEQ ID NO: 5211 - protein, 21 aa, Artificial Sequence
  Description of Artificial Sequence: Synthetic peptide
  MOD_RES (4)..(4): phosphorylated serine
RTASPPPPPKFFRKNLLRLTG

SEQ ID NO: 5212 - protein, 24 aa, Artificial Sequence
  Description of Artificial Sequence: Synthetic peptide
  MOD_RES (7)..(7): phosphorylated serine
RTDPSKSPGSLRYFFRKNLLRLTG

SEQ ID NO: 5213 - protein, 20 aa, Artificial Sequence
  Description of Artificial Sequence: Synthetic peptide
  MOD_RES (4)..(4): phosphorylated serine
RTDSPKIDLFFRKNLLRLTG

SEQ ID NO: 5214 - protein, 20 aa, Artificial Sequence
  Description of Artificial Sequence: Synthetic peptide
  MOD_RES (4)..(4): phosphorylated serine
RTDSPKIDYFFRKNLLRLTG

SEQ ID NO: 5215 - protein, 20 aa, Artificial Sequence
  Description of Artificial Sequence: Synthetic peptide
  MOD_RES (4)..(4): phosphorylated serine
RTDSRAQAVFFRKNLLRLTG

SEQ ID NO: 5216 - protein, 20 aa, Artificial Sequence
  Description of Artificial Sequence: Synthetic peptide
  MOD_RES (4)..(4): phosphorylated serine
RTDSRAQAYFFRKNLLRLTG

SEQ ID NO: 5217 - protein, 22 aa, Artificial Sequence
  Description of Artificial Sequence: Synthetic peptide
  MOD_RES (4)..(4): phosphorylated serine
RTDSYVELSQYFFRKNLLRLTG

SEQ ID NO: 5218 - protein, 24 aa, Artificial Sequence
  Description of Artificial Sequence: Synthetic peptide
  MOD_RES (7)..(7): phosphorylated serine
RTEPSKSPGSLRYFFRKNLLRLTG

SEQ ID NO: 5219 - protein, 21 aa, Artificial Sequence
  Description of Artificial Sequence: Synthetic peptide
  MOD_RES (4)..(4): phosphorylated serine
RTESDSGLKFFFRKNLLRLTG

SEQ ID NO: 5220 - protein, 21 aa, Artificial Sequence
  Description of Artificial Sequence: Synthetic peptide
  MOD_RES (4)..(4): phosphorylated serine
RTESDSGLKKFFRKNLLRLTG

SEQ ID NO: 5221 - protein, 21 aa, Artificial Sequence
  Description of Artificial Sequence: Synthetic peptide
  MOD_RES (4)..(4): phosphorylated serine
RTESDSGLKLFFRKNLLRLTG

SEQ ID NO: 5222 - protein, 21 aa, Artificial Sequence
  Description of Artificial Sequence: Synthetic peptide
  MOD_RES (4)..(4): phosphorylated serine
RTESDSGLKMFFRKNLLRLTG

SEQ ID NO: 5223 - protein, 21 aa, Artificial Sequence
  Description of Artificial Sequence: Synthetic peptide
  MOD_RES (4)..(4): phosphorylated serine
RTESDSGLKVFFRKNLLRLTG

SEQ ID NO: 5224 - protein, 20 aa, Artificial Sequence
  Description of Artificial Sequence: Synthetic peptide
  MOD_RES (4)..(4): phosphorylated serine
RTESPKIDLFFRKNLLRLTG

SEQ ID NO: 5225 - protein, 20 aa, Artificial Sequence
  Description of Artificial Sequence: Synthetic peptide
  MOD_RES (4)..(4): phosphorylated serine
RTESPKIDYFFRKNLLRLTG

SEQ ID NO: 5226 - protein, 20 aa, Artificial Sequence
  Description of Artificial Sequence: Synthetic peptide
  MOD_RES (4)..(4): phosphorylated serine
RTESRAQAVFFRKNLLRLTG

SEQ ID NO: 5227 - protein, 20 aa, Artificial Sequence
  Description of Artificial Sequence: Synthetic peptide
  MOD_RES (4)..(4): phosphorylated serine
RTESRAQAYFFRKNLLRLTG

SEQ ID NO: 5228 - protein, 22 aa, Artificial Sequence
  Description of Artificial Sequence: Synthetic peptide
  MOD_RES (4)..(4): phosphorylated serine
RTESYVELSQYFFRKNLLRLTG

SEQ ID NO: 5229 - protein, 20 aa, Artificial Sequence
  Description of Artificial Sequence: Synthetic peptide
  MOD_RES (4)..(4): phosphorylated serine
RTFSLDTILFFRKNLLRLTG

SEQ ID NO: 5230 - protein, 20 aa, Artificial Sequence
  Description of Artificial Sequence: Synthetic peptide
  MOD_RES (4)..(4): phosphorylated serine
RTFSPTYGFFFRKNLLRLTG

SEQ ID NO: 5231 - protein, 20 aa, Artificial Sequence
  Description of Artificial Sequence: Synthetic peptide
  MOD_RES (4)..(4): phosphorylated serine
RTFSPTYGLFFRKNLLRLTG

SEQ ID NO: 5232 - protein, 20 aa, Artificial Sequence
  Description of Artificial Sequence: Synthetic peptide
  MOD_RES (4)..(4): phosphorylated serine
RTFSPTYGMFFRKNLLRLTG

SEQ ID NO: 5233 - protein, 20 aa, Artificial Sequence
  Description of Artificial Sequence: Synthetic peptide
  MOD_RES (4)..(4): phosphorylated serine
RTFSPTYGVFFRKNLLRLTG

SEQ ID NO: 5234 - protein, 20 aa, Artificial Sequence
  Description of Artificial Sequence: Synthetic peptide
  MOD_RES (4)..(4): phosphorylated serine
RTHSLLLLLFFRKNLLRLTG

SEQ ID NO: 5235 - protein, 20 aa, Artificial Sequence
  Description of Artificial Sequence: Synthetic peptide
  MOD_RES (4)..(4): phosphorylated serine
RTLSHISEAFFRKNLLRLTG

SEQ ID NO: 5236 - protein, 20 aa, Artificial Sequence
  Description of Artificial Sequence: Synthetic peptide
  MOD_RES (4)..(4): phosphorylated serine
RTLSHISEVFFRKNLLRLTG

SEQ ID NO: 5237 - protein, 21 aa, Artificial Sequence
  Description of Artificial Sequence: Synthetic peptide
  MOD_RES (4)..(4): phosphorylated serine
RTLSPEIITVFFRKNLLRLTG

SEQ ID NO: 5238 - protein, 22 aa, Artificial Sequence
  Description of Artificial Sequence: Synthetic peptide
  MOD_RES (4)..(4): phosphorylated serine
RTMSEAALVRKFFRKNLLRLTG

SEQ ID NO: 5239 - protein, 20 aa, Artificial Sequence
  Description of Artificial Sequence: Synthetic peptide
  MOD_RES (4)..(4): phosphorylated serine
RTNSPGFQKFFRKNLLRLTG

SEQ ID NO: 5240 - protein, 20 aa, Artificial Sequence
  Description of Artificial Sequence: Synthetic peptide
  MOD_RES (4)..(4): phosphorylated serine
RTPSDVKELFFRKNLLRLTG

SEQ ID NO: 5241 - protein, 21 aa, Artificial Sequence
  Description of Artificial Sequence: Synthetic peptide
  MOD_RES (4)..(4): phosphorylated serine
RTPSFLKKNKFFRKNLLRLTG

SEQ ID NO: 5242 - protein, 21 aa, Artificial Sequence
  Description of Artificial Sequence: Synthetic peptide
  MOD_RES (4)..(4): phosphorylated serine
RTPSFLKKNYFFRKNLLRLTG

SEQ ID NO: 5243 - protein, 22 aa, Artificial Sequence
  Description of Artificial Sequence: Synthetic peptide
  MOD_RES (4)..(4): phosphorylated serine
RTRSLSSLREKFFRKNLLRLTG

SEQ ID NO: 5244 - protein, 22 aa, Artificial Sequence
  Description of Artificial Sequence: Synthetic peptide
  MOD_RES (4)..(4): phosphorylated serine
RTRSLSSLREYFFRKNLLRLTG

SEQ ID NO: 5245 - protein, 20 aa, Artificial Sequence
  Description of Artificial Sequence: Synthetic peptide
  MOD_RES (4)..(4): phosphorylated serine
RTRSPSPTFFFRKNLLRLTG

SEQ ID NO: 5246 - protein, 20 aa, Artificial Sequence
  Description of Artificial Sequence: Synthetic peptide
  MOD_RES (4)..(4): phosphorylated serine
RTRSPSPTLFFRKNLLRLTG

SEQ ID NO: 5247 - protein, 20 aa, Artificial Sequence
  Description of Artificial Sequence: Synthetic peptide
  MOD_RES (4)..(4): phosphorylated serine
RTRSPSPTMFFRKNLLRLTG

SEQ ID NO: 5248 - protein, 20 aa, Artificial Sequence
  Description of Artificial Sequence: Synthetic peptide
  MOD_RES (4)..(4): phosphorylated serine
RTRSPSPTVFFRKNLLRLTG

SEQ ID NO: 5249 - protein, 20 aa, Artificial Sequence
  Description of Artificial Sequence: Synthetic peptide
  MOD_RES (4)..(4): phosphorylated serine
RTSSFALNLFFRKNLLRLTG

SEQ ID NO: 5250 - protein, 20 aa, Artificial Sequence
  Description of Artificial Sequence: Synthetic peptide
  MOD_RES (4)..(4): phosphorylated serine
RTSSFTEQLFFRKNLLRLTG

SEQ ID NO: 5251 - protein, 20 aa, Artificial Sequence
  Description of Artificial Sequence: Synthetic peptide
  MOD_RES (4)..(4): phosphorylated serine
RTSSFTFQNFFRKNLLRLTG

SEQ ID NO: 5252 - protein, 20 aa, Artificial Sequence
  Description of Artificial Sequence: Synthetic peptide
  MOD_RES (6)..(6): phosphorylated threonine
RTSSFTFQNFFRKNLLRLTG

SEQ ID NO: 5253 - protein, 20 aa, Artificial Sequence
  Description of Artificial Sequence: Synthetic peptide
  MOD_RES (4)..(4): phosphorylated serine
RTSSPLFNKFFRKNLLRLTG

SEQ ID NO: 5254 - protein, 20 aa, Artificial Sequence
  Description of Artificial Sequence: Synthetic peptide
  MOD_RES (5)..(5): phosphorylated serine
RTYKSPLRHFFRKNLLRLTG

SEQ ID NO: 5255 - protein, 20 aa, Artificial Sequence
  Description of Artificial Sequence: Synthetic peptide
  MOD_RES (5)..(5): phosphorylated serine
RTYKSPLRKFFRKNLLRLTG

SEQ ID NO: 5256 - protein, 20 aa, Artificial Sequence
  Description of Artificial Sequence: Synthetic peptide
  MOD_RES (5)..(5): phosphorylated serine
RTYKSPLRYFFRKNLLRLTG

SEQ ID NO: 5257 - protein, 20 aa, Artificial Sequence
  Description of Artificial Sequence: Synthetic peptide
  MOD_RES (4)..(4): phosphorylated serine
RTYSGPMNKFFRKNLLRLTG

SEQ ID NO: 5258 - protein, 21 aa, Artificial Sequence
  Description of Artificial Sequence: Synthetic peptide
  MOD_RES (4)..(4): phosphorylated serine
RTYSGPMNKVFFRKNLLRLTG

SEQ ID NO: 5259 - protein, 20 aa, Artificial Sequence
  Description of Artificial Sequence: Synthetic peptide
  MOD_RES (4)..(4): phosphorylated serine
RTYSHGTYRFFRKNLLRLTG

SEQ ID NO: 5260 - protein, 20 aa, Artificial Sequence
  Description of Artificial Sequence: Synthetic peptide
  MOD_RES (4)..(4): phosphorylated serine
RVASFAVRKFFRKNLLRLTG

SEQ ID NO: 5261 - protein, 20 aa, Artificial Sequence
  Description of Artificial Sequence: Synthetic peptide
  MOD_RES (4)..(4): phosphorylated serine
RVASFAVRYFFRKNLLRLTG

SEQ ID NO: 5262 - protein, 20 aa, Artificial Sequence
  Description of Artificial Sequence: Synthetic peptide
  MOD_RES (4)..(4): phosphorylated serine
RVASPLVHKFFRKNLLRLTG

SEQ ID NO: 5263 - protein, 20 aa, Artificial Sequence
  Description of Artificial Sequence: Synthetic peptide
  MOD_RES (4)..(4): phosphorylated serine
RVASPLVHYFFRKNLLRLTG

SEQ ID NO: 5264 - protein, 21 aa, Artificial Sequence
  Description of Artificial Sequence: Synthetic peptide
  MOD_RES (4)..(4): phosphorylated serine
RVASPPPPPKFFRKNLLRLTG

SEQ ID NO: 5265 - protein, 21 aa, Artificial Sequence
  Description of Artificial Sequence: Synthetic peptide
  MOD_RES (4)..(4): phosphorylated serine
RVASPPPPPYFFRKNLLRLTG

SEQ ID NO: 5266 - protein, 20 aa, Artificial Sequence
  Description of Artificial Sequence: Synthetic peptide
  MOD_RES (4)..(4): phosphorylated serine
RVASPTSGVFFRKNLLRLTG

SEQ ID NO: 5267 - protein, 21 aa, Artificial Sequence
  Description of Artificial Sequence: Synthetic peptide
  MOD_RES (4)..(4): phosphorylated serine
RVASPTSGVKFFRKNLLRLTG

SEQ ID NO: 5268 - protein, 22 aa, Artificial Sequence
  Description of Artificial Sequence: Synthetic peptide
  MOD_RES (4)..(4): phosphorylated serine
RVASPTSGVKKFFRKNLLRLTG

SEQ ID NO: 5269 - protein, 22 aa, Artificial Sequence
  Description of Artificial Sequence: Synthetic peptide
  MOD_RES (4)..(4): phosphorylated serine
RVASPTSGVKRFFRKNLLRLTG

SEQ ID NO: 5270 - protein, 21 aa, Artificial Sequence
  Description of Artificial Sequence: Synthetic peptide
  MOD_RES (4)..(4): phosphorylated serine
RVASPTSGVYFFRKNLLRLTG

SEQ ID NO: 5271 - protein, 20 aa, Artificial Sequence
  Description of Artificial Sequence: Synthetic peptide
  MOD_RES (4)..(4): phosphorylated serine
RVDSPSHGLFFRKNLLRLTG

SEQ ID NO: 5272 - protein, 20 aa, Artificial Sequence
  Description of Artificial Sequence: Synthetic peptide
  MOD_RES (4)..(4): phosphorylated serine
RVGSLVLNLFFRKNLLRLTG

SEQ ID NO: 5273 - protein, 20 aa, Artificial Sequence
  Description of Artificial Sequence: Synthetic peptide
  MOD_RES (4)..(4): phosphorylated serine
RVISGVLQLFFRKNLLRLTG

SEQ ID NO: 5274 - protein, 21 aa, Artificial Sequence
  Description of Artificial Sequence: Synthetic peptide
  MOD_RES (6)..(6): phosphorylated serine
RVKLPSGSKKFFRKNLLRLTG

SEQ ID NO: 5275 - protein, 22 aa, Artificial Sequence
  Description of Artificial Sequence: Synthetic peptide
  MOD_RES (4)..(4): phosphorylated serine
  MOD_RES (7)..(7): phosphorylated serine
RVKSPGSGHVKFFRKNLLRLTG

SEQ ID NO: 5276 - protein, 22 aa, Artificial Sequence
  Description of Artificial Sequence: Synthetic peptide
  MOD_RES (4)..(4): phosphorylated serine
  MOD_RES (7)..(7): phosphorylated serine
RVKSPGSGHVYFFRKNLLRLTG

SEQ ID NO: 5277 - protein, 20 aa, Artificial Sequence
  Description of Artificial Sequence: Synthetic peptide
  MOD_RES (4)..(4): phosphorylated serine
RVKSPISLKFFRKNLLRLTG

SEQ ID NO: 5278 - protein, 22 aa, Artificial Sequence
  Description of Artificial Sequence: Synthetic peptide
  MOD_RES (4)..(4): phosphorylated serine
RVKSPSPKSERFFRKNLLRLTG

SEQ ID NO: 5279 - protein, 22 aa, Artificial Sequence
  Description of Artificial Sequence: Synthetic peptide
  MOD_RES (4)..(4): phosphorylated serine
RVKSPSPKSEYFFRKNLLRLTG

SEQ ID NO: 5280 - protein, 22 aa, Artificial Sequence
  Description of Artificial Sequence: Synthetic peptide
  MOD_RES (4)..(4): phosphorylated threonine
RVKTPTSQSYKFFRKNLLRLTG

SEQ ID NO: 5281 - protein, 22 aa, Artificial Sequence
  Description of Artificial Sequence: Synthetic peptide
  MOD_RES (4)..(4): phosphorylated threonine
RVKTPTSQSYRFFRKNLLRLTG

SEQ ID NO: 5282 - protein, 22 aa, Artificial Sequence
  Description of Artificial Sequence: Synthetic peptide
  MOD_RES (4)..(4): phosphorylated threonine
RVKTPTSQSYYFFRKNLLRLTG

SEQ ID NO: 5283 - protein, 20 aa, Artificial Sequence
  Description of Artificial Sequence: Synthetic peptide
  MOD_RES (5)..(5): phosphorylated threonine
RVKTTPLRRFFRKNLLRLTG

SEQ ID NO: 5284 - protein, 20 aa, Artificial Sequence
  Description of Artificial Sequence: Synthetic peptide
  MOD_RES (5)..(5): phosphorylated threonine
RVKTTPLRYFFRKNLLRLTG

SEQ ID NO: 5285 - protein, 23 aa, Artificial Sequence
  Description of Artificial Sequence: Synthetic peptide
  MOD_RES (8)..(8): phosphorylated serine
RVLDRSPSRSAKFFRKNLLRLTG

SEQ ID NO: 5286 - protein, 23 aa, Artificial Sequence
  Description of Artificial Sequence: Synthetic peptide
  MOD_RES (8)..(8): phosphorylated serine
RVLDRSPSRSAYFFRKNLLRLTG

SEQ ID NO: 5287 - protein, 20 aa, Artificial Sequence
  Description of Artificial Sequence: Synthetic peptide
  MOD_RES (5)..(5): phosphorylated serine
RVLHSPPAVFFRKNLLRLTG

SEQ ID NO: 5288 - protein, 20 aa, Artificial Sequence
  Description of Artificial Sequence: Synthetic peptide
  MOD_RES (4)..(4): phosphorylated serine
RVLSGVVTKFFRKNLLRLTG

SEQ ID NO: 5289 - protein, 20 aa, Artificial Sequence
  Description of Artificial Sequence: Synthetic peptide
  MOD_RES (4)..(4): phosphorylated serine
RVLSPLIIKFFRKNLLRLTG

SEQ ID NO: 5290 - protein, 20 aa, Artificial Sequence
  Description of Artificial Sequence: Synthetic peptide
  MOD_RES (4)..(4): phosphorylated serine
RVPSLLVLLFFRKNLLRLTG

SEQ ID NO: 5291 - protein, 20 aa, Artificial Sequence
  Description of Artificial Sequence: Synthetic peptide
  MOD_RES (4)..(4): phosphorylated serine
RVPSSTLKKFFRKNLLRLTG

SEQ ID NO: 5292 - protein, 20 aa, Artificial Sequence
  Description of Artificial Sequence: Synthetic peptide
  MOD_RES (4)..(4): phosphorylated serine
RVPSSTLKYFFRKNLLRLTG

SEQ ID NO: 5293 - protein, 21 aa, Artificial Sequence
  Description of Artificial Sequence: Synthetic peptide
  MOD_RES (7)..(7): phosphorylated serine
RVRKLPSTTLFFRKNLLRLTG

SEQ ID NO: 5294 - protein, 21 aa, Artificial Sequence
  Description of Artificial Sequence: Synthetic peptide
  MOD_RES (5)..(5): phosphorylated serine
RVRQSPLATKFFRKNLLRLTG

SEQ ID NO: 5295 - protein, 21 aa, Artificial Sequence
  Description of Artificial Sequence: Synthetic peptide
  MOD_RES (5)..(5): phosphorylated serine
RVRQSPLATRFFRKNLLRLTG

SEQ ID NO: 5296 - protein, 21 aa, Artificial Sequence
  Description of Artificial Sequence: Synthetic peptide
  MOD_RES (5)..(5): phosphorylated serine
RVRQSPLATYFFRKNLLRLTG

SEQ ID NO: 5297 - protein, 22 aa, Artificial Sequence
  Description of Artificial Sequence: Synthetic peptide
  MOD_RES (5)..(5): phosphorylated serine
RVRRSSFLNAKFFRKNLLRLTG

SEQ ID NO: 5298 - protein, 22 aa, Artificial Sequence
  Description of Artificial Sequence: Synthetic peptide
  MOD_RES (4)..(4): phosphorylated serine
RVRSLSSLREKFFRKNLLRLTG

SEQ ID NO: 5299 - protein, 22 aa, Artificial Sequence
  Description of Artificial Sequence: Synthetic peptide
  MOD_RES (4)..(4): phosphorylated serine
RVRSLSSLREYFFRKNLLRLTG

SEQ ID NO: 5300 - protein, 20 aa, Artificial Sequence
  Description of Artificial Sequence: Synthetic peptide
  MOD_RES (4)..(4): phosphorylated serine
RVRSPTRSFFFRKNLLRLTG

SEQ ID NO: 5301 - protein, 20 aa, Artificial Sequence
  Description of Artificial Sequence: Synthetic peptide
  MOD_RES (4)..(4): phosphorylated serine
RVRSPTRSLFFRKNLLRLTG

SEQ ID NO: 5302 - protein, 20 aa, Artificial Sequence
  Description of Artificial Sequence: Synthetic peptide
  MOD_RES (4)..(4): phosphorylated serine
RVRSPTRSMFFRKNLLRLTG

SEQ ID NO: 5303 - protein, 20 aa, Artificial Sequence
  Description of Artificial Sequence: Synthetic peptide
  MOD_RES (4)..(4): phosphorylated serine
RVRSPTRSPFFRKNLLRLTG

SEQ ID NO: 5304 - protein, 20 aa, Artificial Sequence
  Description of Artificial Sequence: Synthetic peptide
  MOD_RES (4)..(4): phosphorylated serine
RVRSPTRSVFFRKNLLRLTG

SEQ ID NO: 5305 - protein, 20 aa, Artificial Sequence
  Description of Artificial Sequence: Synthetic peptide
  MOD_RES (4)..(4): phosphorylated serine
RVSSPISKKFFRKNLLRLTG

SEQ ID NO: 5306 - protein, 20 aa, Artificial Sequence
  Description of Artificial Sequence: Synthetic peptide
  MOD_RES (4)..(4): phosphorylated serine
RVSSPISKYFFRKNLLRLTG

SEQ ID NO: 5307 - protein, 20 aa, Artificial Sequence
  Description of Artificial Sequence: Synthetic peptide
  MOD_RES (4)..(4): phosphorylated serine
RVSSRFSSKFFRKNLLRLTG

SEQ ID NO: 5308 - protein, 20 aa, Artificial Sequence
  Description of Artificial Sequence: Synthetic peptide
  MOD_RES (4)..(4): phosphorylated serine
RVSSRFSSRFFRKNLLRLTG

SEQ ID NO: 5309 - protein, 20 aa, Artificial Sequence
  Description of Artificial Sequence: Synthetic peptide
  MOD_RES (4)..(4): phosphorylated serine
RVSSRFSSYFFRKNLLRLTG

SEQ ID NO: 5310 - protein, 21 aa, Artificial Sequence
  Description of Artificial Sequence: Synthetic peptide
  MOD_RES (4)..(4): phosphorylated serine
RVSSVKLISKFFRKNLLRLTG

SEQ ID NO: 5311 - protein, 21 aa, Artificial Sequence
  Description of Artificial Sequence: Synthetic peptide
  MOD_RES (4)..(4): phosphorylated serine
RVSSVKLISYFFRKNLLRLTG

SEQ ID NO: 5312 - protein, 20 aa, Artificial Sequence
  Description of Artificial Sequence: Synthetic peptide
  MOD_RES (4)..(4): phosphorylated serine
RVTSAEIKLFFRKNLLRLTG

SEQ ID NO: 5313 - protein, 20 aa, Artificial Sequence
  Description of Artificial Sequence: Synthetic peptide
  MOD_RES (4)..(4): phosphorylated serine
RVVSLSMRKFFRKNLLRLTG

SEQ ID NO: 5314 - protein, 20 aa, Artificial Sequence
  Description of Artificial Sequence: Synthetic peptide
  MOD_RES (4)..(4): phosphorylated serine
RVVSLSMRYFFRKNLLRLTG

SEQ ID NO: 5315 - protein, 21 aa, Artificial Sequence
  Description of Artificial Sequence: Synthetic peptide
  MOD_RES (9)..(9): phosphorylated serine
RVWEDRPSSAFFRKNLLRLTG

SEQ ID NO: 5316 - protein, 22 aa, Artificial Sequence
  Description of Artificial Sequence: Synthetic peptide
  MOD_RES (4)..(4): phosphorylated serine
RVWSPPRVHKVFFRKNLLRLTG

SEQ ID NO: 5317 - protein, 20 aa, Artificial Sequence
  Description of Artificial Sequence: Synthetic peptide
  MOD_RES (5)..(5): phosphorylated tyrosine
RVYQYIQSRFFRKNLLRLTG

SEQ ID NO: 5318 - protein, 22 aa, Artificial Sequence
  Description of Artificial Sequence: Synthetic peptide
  MOD_RES (5)..(5): phosphorylated tyrosine
RVYQYIQSRFKFFRKNLLRLTG

SEQ ID NO: 5319 - protein, 22 aa, Artificial Sequence
  Description of Artificial Sequence: Synthetic peptide
  MOD_RES (5)..(5): phosphorylated tyrosine
RVYQYIQSRFYFFRKNLLRLTG

SEQ ID NO: 5320 - protein, 21 aa, Artificial Sequence
  Description of Artificial Sequence: Synthetic peptide
  MOD_RES (5)..(5): phosphorylated tyrosine
RVYQYIQSRKFFRKNLLRLTG

SEQ ID NO: 5321 - protein, 21 aa, Artificial Sequence
  Description of Artificial Sequence: Synthetic peptide
  MOD_RES (5)..(5): phosphorylated tyrosine
RVYQYIQSRYFFRKNLLRLTG

SEQ ID NO: 5322 - protein, 20 aa, Artificial Sequence
  Description of Artificial Sequence: Synthetic peptide
  MOD_RES (4)..(4): phosphorylated serine
RVYSPYNHKFFRKNLLRLTG

SEQ ID NO: 5323 - protein, 20 aa, Artificial Sequence
  Description of Artificial Sequence: Synthetic peptide
  MOD_RES (4)..(4): phosphorylated serine
RVYSPYNHRFFRKNLLRLTG

SEQ ID NO: 5324 - protein, 20 aa, Artificial Sequence
  Description of Artificial Sequence: Synthetic peptide
  MOD_RES (4)..(4): phosphorylated serine
RVYSPYNHYFFRKNLLRLTG

SEQ ID NO: 5325 - protein, 20 aa, Artificial Sequence
  Description of Artificial Sequence: Synthetic peptide
  MOD_RES (6)..(6): phosphorylated serine
RVYSRSFSKFFRKNLLRLTG

SEQ ID NO: 5326 - protein, 20 aa, Artificial Sequence
  Description of Artificial Sequence: Synthetic peptide
  MOD_RES (6)..(6): phosphorylated serine
RVYSRSFSYFFRKNLLRLTG

SEQ ID NO: 5327 - protein, 20 aa, Artificial Sequence
  Description of Artificial Sequence: Synthetic peptide
  MOD_RES (4)..(4): phosphorylated serine
RYPSNLQLFFFRKNLLRLTG

SEQ ID NO: 5328 - protein, 20 aa, Artificial Sequence
  Description of Artificial Sequence: Synthetic peptide
  MOD_RES (4)..(4): phosphorylated threonine
RYQTQPVTLFFRKNLLRLTG

SEQ ID NO: 5329 - protein, 33 aa, Artificial Sequence; identical to SEQ ID NO: 3001
  Description of Artificial Sequence: Synthetic polypeptide
  MOD_RES (16)..(16): phosphorylated serine

SEQ ID NO: 5330 - protein, 25 aa, Artificial Sequence
  Description of Artificial Sequence: Synthetic peptide
  MOD_RES (5)..(5): phosphorylated serine
SARGSPTRPNPPVRFFRKNLLRLTG

SEQ ID NO: 5331 - protein, 20 aa, Artificial Sequence
  Description of Artificial Sequence: Synthetic peptide
  MOD_RES (5)..(5): phosphorylated threonine
SARRTPVSYFFRKNLLRLTG

SEQ ID NO: 5332 - protein, 21 aa, Artificial Sequence
  Description of Artificial Sequence: Synthetic peptide
  MOD_RES (1)..(1): phosphorylated serine
SDDEKMPDLEFFRKNLLRLTG

SEQ ID NO: 5333 - protein, 23 aa, Artificial Sequence
  Description of Artificial Sequence: Synthetic peptide
  MOD_RES (1)..(1): phosphorylated serine
SDFHAERAAREKFFRKNLLRLTG

SEQ ID NO: 5334 - protein, 20 aa, Artificial Sequence
  Description of Artificial Sequence: Synthetic peptide
  MOD_RES (3)..(3): oxidized methionine
  MOD_RES (8)..(8): phosphorylated serine
SDMPRAHSFFFRKNLLRLTG

SEQ ID NO: 5335 - protein, 20 aa, Artificial Sequence
  Description of Artificial Sequence: Synthetic peptide
  MOD_RES (8)..(8): phosphorylated serine
SDMPRAHSFFFRKNLLRLTG

SEQ ID NO: 5336 - protein, 20 aa, Artificial Sequence
  Description of Artificial Sequence: Synthetic peptide
  MOD_RES (8)..(8): phosphorylated serine
SEFKAMDSIFFRKNLLRLTG

SEQ ID NO: 5337 - protein, 20 aa, Artificial Sequence
  Description of Artificial Sequence: Synthetic peptide
  MOD_RES (4)..(4): phosphorylated serine
SEGSLHRKFFFRKNLLRLTG

SEQ ID NO: 5338 - protein, 20 aa, Artificial Sequence
  Description of Artificial Sequence: Synthetic peptide
  MOD_RES (4)..(4): phosphorylated serine
SEGSLHRKWFFRKNLLRLTG

SEQ ID NO: 5339 - protein, 20 aa, Artificial Sequence
  Description of Artificial Sequence: Synthetic peptide
  MOD_RES (4)..(4): phosphorylated serine
SEGSLHRKYFFRKNLLRLTG

SEQ ID NO: 5340 - protein, 20 aa, Artificial Sequence
  Description of Artificial Sequence: Synthetic peptide
  MOD_RES (4)..(4): phosphorylated serine
SELSPGRSVFFRKNLLRLTG

SEQ ID NO: 5341 - protein, 20 aa, Artificial Sequence
  Description of Artificial Sequence: Synthetic peptide
  MOD_RES (4)..(4): phosphorylated serine
SFDSGSVRLFFRKNLLRLTG

SEQ ID NO: 5342 - protein, 25 aa, Artificial Sequence
  Description of Artificial Sequence: Synthetic peptide
  MOD_RES (6)..(6): phosphorylated serine
SGGAQSPLRYLHVLFFRKNLLRLTG

SEQ ID NO: 5343 - protein, 30 aa, Artificial Sequence
  Description of Artificial Sequence: Synthetic polypeptide
  MOD_RES (1)..(1): phosphorylated serine
SGGDDDWTHLSSKEVDPSTFFRKNLLRLTG

SEQ ID NO: 5344 - protein, 31 aa, Artificial Sequence
  Description of Artificial Sequence: Synthetic polypeptide
  MOD_RES (1)..(1): phosphorylated serine
SGGDDDWTHLSSKEVDPSTGFFRKNLLRLTG

SEQ ID NO: 5345 - protein, 32 aa, Artificial Sequence
  Description of Artificial Sequence: Synthetic polypeptide
  MOD_RES (1)..(1): phosphorylated serine
SGGDDDWTHLSSKEVDPSTGEFFRKNLLRLTG

SEQ ID NO: 5346 - protein, 33 aa, Artificial Sequence
  Description of Artificial Sequence: Synthetic polypeptide
  MOD_RES (1)..(1): phosphorylated serine
SGGDDDWTHLSSKEVDPSTGELFFRKNLLRLTG

SEQ ID NO: 5347 - protein, 34 aa, Artificial Sequence
  Description of Artificial Sequence: Synthetic polypeptide
  MOD_RES (1)..(1): phosphorylated serine
SGGDDDWTHLSSKEVDPSTGELQFFRKNLLRLTG

SEQ ID NO: 5348 - protein, 29 aa, Artificial Sequence
  Description of Artificial Sequence: Synthetic peptide
  MOD_RES (11)..(11): phosphorylated serine
SGPKPLFRRMSSLVGPTQFFRKNLLRLTG

SEQ ID NO: 5349 - protein, 19 aa, Artificial Sequence
  Description of Artificial Sequence: Synthetic peptide
  MOD_RES (4)..(4): phosphorylated serine
SIDSPQKLFFRKNLLRLTG

SEQ ID NO: 5350 - protein, 19 aa, Artificial Sequence
  Description of Artificial Sequence: Synthetic peptide
  MOD_RES (4)..(4): phosphorylated serine
SIDSPQKYFFRKNLLRLTG

SEQ ID NO: 5351 - protein, 20 aa, Artificial Sequence
  Description of Artificial Sequence: Synthetic peptide
  MOD_RES (4)..(4): phosphorylated serine
SILSFVSGLFFRKNLLRLTG

SEQ ID NO: 5352 - protein, 20 aa, Artificial Sequence
  Description of Artificial Sequence: Synthetic peptide
  MOD_RES (4)..(4): phosphorylated serine
SIMSFHIDLFFRKNLLRLTG

SEQ ID NO: 5353 - protein, 20 aa, Artificial Sequence
  Description of Artificial Sequence: Synthetic peptide
  MOD_RES (3)..(3): oxidized methionine
  MOD_RES (4)..(4): phosphorylated serine
SIMSPEIQLFFRKNLLRLTG

SEQ ID NO: 5354 - protein, 20 aa, Artificial Sequence
  Description of Artificial Sequence: Synthetic peptide
  MOD_RES (4)..(4): phosphorylated serine
SIMSPEIQLFFRKNLLRLTG

SEQ ID NO: 5355 - protein, 20 aa, Artificial Sequence
  Description of Artificial Sequence: Synthetic peptide
  MOD_RES (4)..(4): phosphorylated threonine
SIPTVSGQIFFRKNLLRLTG

SEQ ID NO: 5356 - protein, 20 aa, Artificial Sequence
  Description of Artificial Sequence: Synthetic peptide
  MOD_RES (4)..(4): phosphorylated serine
SISSMEVNVFFRKNLLRLTG

SEQ ID NO: 5357 - protein, 20 aa, Artificial Sequence
  Description of Artificial Sequence: Synthetic peptide
  MOD_RES (5)..(5): phosphorylated threonine
SISSTPPAVFFRKNLLRLTG

SEQ ID NO: 5358 - protein, 33 aa, Artificial Sequence
  Description of Artificial Sequence: Synthetic polypeptide
  MOD_RES (21)..(21): phosphorylated serine
SKEDKNGHDGDTHQEDDGEKSDFFRKNLLRLTG

SEQ ID NO: 5359 - protein, 19 aa, Artificial Sequence
  Description of Artificial Sequence: Synthetic peptide
  MOD_RES (5)..(5): phosphorylated tyrosine
SKRGYIGLFFRKNLLRLTG

SEQ ID NO: 5360 - protein, 20 aa, Artificial Sequence
  Description of Artificial Sequence: Synthetic peptide
  MOD_RES (3)..(3): phosphorylated threonine
SKTVATFILFFRKNLLRLTG

SEQ ID NO: 5361 - protein, 20 aa, Artificial Sequence
  Description of Artificial Sequence: Synthetic peptide
  MOD_RES (4)..(4): phosphorylated serine
SLASLTEKIFFRKNLLRLTG

SEQ ID NO: 5362 - protein, 20 aa, Artificial Sequence
  Description of Artificial Sequence: Synthetic peptide
  MOD_RES (8)..(8): phosphorylated serine
SLDSEDYSLFFRKNLLRLTG

SEQ ID NO: 5363 - protein, 21 aa, Artificial Sequence
  Description of Artificial Sequence: Synthetic peptide
  MOD_RES (4)..(4): phosphorylated serine
SLDSLGDVFLFFRKNLLRLTG

SEQ ID NO: 5364 - protein, 21 aa, Artificial Sequence
  Description of Artificial Sequence: Synthetic peptide
  MOD_RES (4)..(4): phosphorylated serine
SLDSPSYVLYFFRKNLLRLTG

SEQ ID NO: 5365 - protein, 21 aa, Artificial Sequence
  Description of Artificial Sequence: Synthetic peptide
  MOD_RES (4)..(4): phosphorylated serine
SLESPSYVLYFFRKNLLRLTG

SEQ ID NO: 5366 - protein, 20 aa, Artificial Sequence
  Description of Artificial Sequence: Synthetic peptide
  MOD_RES (6)..(6): phosphorylated serine
SLFGGSVKLFFRKNLLRLTG

SEQ ID NO: 5367 - protein, 20 aa, Artificial Sequence
  Description of Artificial Sequence: Synthetic peptide
  MOD_RES (8)..(8): phosphorylated serine
SLFKRLYSLFFRKNLLRLTG

SEQ ID NO: 5368 - protein, 21 aa, Artificial Sequence
  Description of Artificial Sequence: Synthetic peptide
  MOD_RES (4)..(4): phosphorylated serine
SLFSGDEENAFFRKNLLRLTG

SEQ ID NO: 5369 - protein, 21 aa, Artificial Sequence
  Description of Artificial Sequence: Synthetic peptide
  MOD_RES (4)..(4): phosphorylated serine
SLFSGSYSSLFFRKNLLRLTG

SEQ ID NO: 5370 - protein, 20 aa, Artificial Sequence
  Description of Artificial Sequence: Synthetic peptide
  MOD_RES (4)..(4): phosphorylated serine
SLFSPQNTLFFRKNLLRLTG

SEQ ID NO: 5371 - protein, 20 aa, Artificial Sequence
  Description of Artificial Sequence: Synthetic peptide
  MOD_RES (4)..(4): phosphorylated serine
SLFSPRRNKFFRKNLLRLTG

SEQ ID NO: 5372 - protein, 20 aa, Artificial Sequence
  Description of Artificial Sequence: Synthetic peptide
  MOD_RES (4)..(4): phosphorylated serine
SLFSPRRNYFFRKNLLRLTG

SEQ ID NO: 5373 - protein, 21 aa, Artificial Sequence
  Description of Artificial Sequence: Synthetic peptide
  MOD_RES (4)..(4): phosphorylated serine
SLFSSEESNLFFRKNLLRLTG

SEQ ID NO: 5374 - protein, 23 aa, Artificial Sequence
  Description of Artificial Sequence: Synthetic peptide
  MOD_RES (4)..(4): phosphorylated serine
SLFSSEESNLGAFFRKNLLRLTG

SEQ ID NO: 5375 - protein, 20 aa, Artificial Sequence
  Description of Artificial Sequence: Synthetic peptide
  MOD_RES (8)..(8): phosphorylated serine
SLHDIQLSLFFRKNLLRLTG

SEQ ID NO: 5376 - protein, 20 aa, Artificial Sequence
  Description of Artificial Sequence: Synthetic peptide
  MOD_RES (4)..(4): phosphorylated serine
SLKSPVTVKFFRKNLLRLTG

SEQ ID NO: 5377 - protein, 22 aa, Artificial Sequence
  Description of Artificial Sequence: Synthetic peptide
  MOD_RES (5)..(5): phosphorylated serine
SLLASPGHISVFFRKNLLRLTG

SEQ ID NO: 5378 - protein, 20 aa, Artificial Sequence
  Description of Artificial Sequence: Synthetic peptide
  MOD_RES (8)..(8): phosphorylated serine
SLLHTSRSLFFRKNLLRLTG

SEQ ID NO: 5379 - protein, 21 aa, Artificial Sequence
  Description of Artificial Sequence: Synthetic peptide
  MOD_RES (7)..(7): phosphorylated serine
SLLNKSSPVKFFRKNLLRLTG

SEQ ID NO: 5380 - protein, 22 aa, Artificial Sequence
  Description of Artificial Sequence: Synthetic peptide
  MOD_RES (7)..(7): phosphorylated serine
SLLNKSSPVKKFFRKNLLRLTG

SEQ ID NO: 5381 - protein, 22 aa, Artificial Sequence
  Description of Artificial Sequence: Synthetic peptide
  MOD_RES (7)..(7): phosphorylated serine
SLLNKSSPVKYFFRKNLLRLTG

SEQ ID NO: 5382 - protein, 20 aa, Artificial Sequence
  Description of Artificial Sequence: Synthetic peptide
  MOD_RES (4)..(4): phosphorylated serine
SLLSLHVDLFFRKNLLRLTG

SEQ ID NO: 5383 - protein, 20 aa, Artificial Sequence
  Description of Artificial Sequence: Synthetic peptide
  MOD_RES (5)..(5): phosphorylated serine
SLLTSPPKAFFRKNLLRLTG

SEQ ID NO: 5384 - protein, 20 aa, Artificial Sequence
  Description of Artificial Sequence: Synthetic peptide
  MOD_RES (5)..(5): phosphorylated serine
SLLTSPPKVFFRKNLLRLTG

SEQ ID NO: 5385 - protein, 21 aa, Artificial Sequence
  Description of Artificial Sequence: Synthetic peptide
  MOD_RES (4)..(4): phosphorylated serine
SLMSGTLESLFFRKNLLRLTG

SEQ ID NO: 5386 - protein, 20 aa, Artificial Sequence
  Description of Artificial Sequence: Synthetic peptide
  MOD_RES (4)..(4): phosphorylated serine
SLMSPGRRKFFRKNLLRLTG

SEQ ID NO: 5387 - protein, 20 aa, Artificial Sequence
  Description of Artificial Sequence: Synthetic peptide
  MOD_RES (4)..(4): phosphorylated serine
SLMSPGRRYFFRKNLLRLTG

SEQ ID NO: 5388 - protein, 20 aa, Artificial Sequence
  Description of Artificial Sequence: Synthetic peptide
  MOD_RES (8)..(8): phosphorylated serine
SLQPRSHSVFFRKNLLRLTG

SEQ ID NO: 5389 - protein, 20 aa, Artificial Sequence
  Description of Artificial Sequence: Synthetic peptide
  MOD_RES (4)..(4): phosphorylated serine
SLQSLETSVFFRKNLLRLTG

SEQ ID NO: 5390 - protein, 20 aa, Artificial Sequence
  Description of Artificial Sequence: Synthetic peptide
  MOD_RES (5)..(5): phosphorylated serine
SLRRSVLMKFFRKNLLRLTG

SEQ ID NO: 5391 - protein, 20 aa, Artificial Sequence
  Description of Artificial Sequence: Synthetic peptide
  MOD_RES (5)..(5): phosphorylated serine
SLRRSVLMYFFRKNLLRLTG

SEQ ID NO: 5392 - protein, 20 aa, Artificial Sequence
  Description of Artificial Sequence: Synthetic peptide
  MOD_RES (4)..(4): phosphorylated serine
SLSSLLVKLFFRKNLLRLTG

SEQ ID NO: 5393 - protein, 20 aa, Artificial Sequence
  Description of Artificial Sequence: Synthetic peptide
  MOD_RES (3)..(3): phosphorylated threonine
SLTRSPPRVFFRKNLLRLTG

SEQ ID NO: 5394 - protein, 20 aa, Artificial Sequence
  Description of Artificial Sequence: Synthetic peptide
  MOD_RES (5)..(5): phosphorylated serine
SLTRSPPRVFFRKNLLRLTG

SEQ ID NO: 5395 - protein, 20 aa, Artificial Sequence
  Description of Artificial Sequence: Synthetic peptide
  MOD_RES (6)..(6): phosphorylated tyrosine
SLVDGYFRLFFRKNLLRLTG

SEQ ID NO: 5396 - protein, 20 aa, Artificial Sequence
  Description of Artificial Sequence: Synthetic peptide
  MOD_RES (8)..(8): phosphorylated serine
SLYDRPASYFFRKNLLRLTG

SEQ ID NO: 5397 - protein, 20 aa, Artificial Sequence
  Description of Artificial Sequence: Synthetic peptide
  MOD_RES (4)..(4): phosphorylated serine
SLYSPVKKKFFRKNLLRLTG

SEQ ID NO: 5398 - protein, 20 aa, Artificial Sequence
  Description of Artificial Sequence: Synthetic peptide
  MOD_RES (4)..(4): phosphorylated serine
SMFSPRRNKFFRKNLLRLTG

SEQ ID NO: 5399 - protein, 20 aa, Artificial Sequence
  Description of Artificial Sequence: Synthetic peptide
  MOD_RES (4)..(4): phosphorylated serine
SMKSPVTVKFFRKNLLRLTG

SEQ ID NO: 5400 - protein, 21 aa, Artificial Sequence
  Description of Artificial Sequence: Synthetic peptide
  MOD_RES (7)..(7): phosphorylated serine
SMLNKSSPVKFFRKNLLRLTG

SEQ ID NO: 5401 - protein, 22 aa, Artificial Sequence
  Description of Artificial Sequence: Synthetic peptide
  MOD_RES (7)..(7): phosphorylated serine
SMLNKSSPVKKFFRKNLLRLTG

SEQ ID NO: 5402 - protein, 21 aa, Artificial Sequence
  Description of Artificial Sequence: Synthetic peptide
  MOD_RES (4)..(4): phosphorylated serine
SMLSQEIQTLFFRKNLLRLTG

SEQ ID NO: 5403 - protein, 20 aa, Artificial Sequence
  Description of Artificial Sequence: Synthetic peptide
  MOD_RES (5)..(5): phosphorylated serine
SMLTSPPKAFFRKNLLRLTG

SEQ ID NO: 5404 - protein, 20 aa, Artificial Sequence
  Description of Artificial Sequence: Synthetic peptide
  MOD_RES (5)..(5): phosphorylated serine
SMLTSPPKVFFRKNLLRLTG

SEQ ID NO: 5405 - protein, 20 aa, Artificial Sequence
  Description of Artificial Sequence: Synthetic peptide
  MOD_RES (4)..(4): phosphorylated serine
SMMSPGRRKFFRKNLLRLTG

SEQ ID NO: 5406 - protein, 20 aa, Artificial Sequence
  Description of Artificial Sequence: Synthetic peptide
  MOD_RES (8)..(8): phosphorylated serine
SMQPRSHSVFFRKNLLRLTG

SEQ ID NO: 5407 - protein, 20 aa, Artificial Sequence
  Description of Artificial Sequence: Synthetic peptide
  MOD_RES (5)..(5): phosphorylated serine
SMRRSVLMKFFRKNLLRLTG

SEQ ID NO: 5408 - protein, 20 aa, Artificial Sequence
  Description of Artificial Sequence: Synthetic peptide
  MOD_RES (4)..(4): phosphorylated serine
SMSSLSREVFFRKNLLRLTG

SEQ ID NO: 5409 - protein, 20 aa, Artificial Sequence
  Description of Artificial Sequence: Synthetic peptide
  MOD_RES (3)..(3): phosphorylated threonine
SMTRSPPRVFFRKNLLRLTG

SEQ ID NO: 5410 - protein, 20 aa, Artificial Sequence
  Description of Artificial Sequence: Synthetic peptide
  MOD_RES (5)..(5): phosphorylated serine
SMTRSPPRVFFRKNLLRLTG

SEQ ID NO: 5411 - protein, 20 aa, Artificial Sequence
  Description of Artificial Sequence: Synthetic peptide
  MOD_RES (4)..(4): phosphorylated serine
SMYSPVKKKFFRKNLLRLTG

SEQ ID NO: 5412 - protein, 22 aa, Artificial Sequence
  Description of Artificial Sequence: Synthetic peptide
  MOD_RES (5)..(5): phosphorylated serine
SNFKSPVKTIRFFRKNLLRLTG

SEQ ID NO: 5413 - protein, 29 aa, Artificial Sequence
  Description of Artificial Sequence: Synthetic peptide
  MOD_RES (10)..(10): phosphorylated serine
SPAASISRLSGEQVDGKGFFRKNLLRLTG

SEQ ID NO: 5414 - protein, 20 aa, Artificial Sequence
  Description of Artificial Sequence: Synthetic peptide
  MOD_RES (4)..(4): phosphorylated serine
SPASPKISFFFRKNLLRLTG

SEQ ID NO: 5415 - protein, 20 aa, Artificial Sequence
  Description of Artificial Sequence: Synthetic peptide
  MOD_RES (4)..(4): phosphorylated serine
SPASPKISLFFRKNLLRLTG

SEQ ID NO: 5416 - protein, 20 aa, Artificial Sequence
  Description of Artificial Sequence: Synthetic peptide
  MOD_RES (4)..(4): phosphorylated serine
SPASPKISMFFRKNLLRLTG

SEQ ID NO: 5417 - protein, 20 aa, Artificial Sequence
  Description of Artificial Sequence: Synthetic peptide
  MOD_RES (4)..(4): phosphorylated serine
SPASPKISVFFRKNLLRLTG

SEQ ID NO: 5418 - protein, 20 aa, Artificial Sequence
  Description of Artificial Sequence: Synthetic peptide
  MOD_RES (4)..(4): phosphorylated serine
SPDSSQSSLFFRKNLLRLTG

SEQ ID NO: 5419 - protein, 28 aa, Artificial Sequence
  Description of Artificial Sequence: Synthetic peptide
  MOD_RES (1)..(1): phosphorylated serine
SPEDEYELLMPHRISSHFFRKNLLRLTG

SEQ ID NO: 5420 - protein, 28 aa, Artificial Sequence
  Description of Artificial Sequence: Synthetic peptide
  MOD_RES (15)..(15): phosphorylated serine
SPEDEYELLMPHRISSHFFRKNLLRLTG

SEQ ID NO: 5421 - protein, 22 aa, Artificial Sequence
  Description of Artificial Sequence: Synthetic peptide
  MOD_RES (9)..(9): phosphorylated serine
SPEKAGRRSSFFFRKNLLRLTG

SEQ ID NO: 5422 - protein, 22 aa, Artificial Sequence
  Description of Artificial Sequence: Synthetic peptide
  MOD_RES (9)..(9): phosphorylated serine
SPEKAGRRSSLFFRKNLLRLTG

SEQ ID NO: 5423 - protein, 22 aa, Artificial Sequence
  Description of Artificial Sequence: Synthetic peptide
  MOD_RES (9)..(9): phosphorylated serine
SPEKAGRRSSMFFRKNLLRLTG

SEQ ID NO: 5424 - protein, 22 aa, Artificial Sequence
  Description of Artificial Sequence: Synthetic peptide
  MOD_RES (9)..(9): phosphorylated serine
SPEKAGRRSSVFFRKNLLRLTG

SEQ ID NO: 5425 - protein, 29 aa, Artificial Sequence
  Description of Artificial Sequence: Synthetic peptide
  MOD_RES (1)..(1): phosphorylated serine
SPERPFLAILGGAKVADKFFRKNLLRLTG

SEQ ID NO: 5426 - protein, 31 aa, Artificial Sequence
  Description of Artificial Sequence: Synthetic polypeptide
  MOD_RES (1)..(1): phosphorylated serine
SPERPFLAILGGAKVADKIQFFRKNLLRLTG

SEQ ID NO: 5427 - protein, 20 aa, Artificial Sequence
  Description of Artificial Sequence: Synthetic peptide
  MOD_RES (8)..(8): phosphorylated serine
SPFKRQLSFFFRKNLLRLTG

SEQ ID NO: 5428 - protein, 20 aa, Artificial Sequence
  Description of Artificial Sequence: Synthetic peptide
  MOD_RES (8)..(8): phosphorylated serine
SPFKRQLSLFFRKNLLRLTG

SEQ ID NO: 5429 - protein, 20 aa, Artificial Sequence
  Description of Artificial Sequence: Synthetic peptide
  MOD_RES (8)..(8): phosphorylated serine
SPFKRQLSMFFRKNLLRLTG

SEQ ID NO: 5430 - protein, 20 aa, Artificial Sequence
  Description of Artificial Sequence: Synthetic peptide
  MOD_RES (8)..(8): phosphorylated serine
SPFKRQLSVFFRKNLLRLTG

SEQ ID NO: 5431 - protein, 20 aa, Artificial Sequence
  Description of Artificial Sequence: Synthetic peptide
  MOD_RES (5)..(5): phosphorylated serine
SPFLSKRSLFFRKNLLRLTG

SEQ ID NO: 5432 - protein, 21 aa, Artificial Sequence
  Description of Artificial Sequence: Synthetic peptide
  MOD_RES (9)..(9): phosphorylated serine
SPGLARKRSFFFRKNLLRLTG

SEQ ID NO: 5433 - protein, 21 aa, Artificial Sequence
  Description of Artificial Sequence: Synthetic peptide
  MOD_RES (9)..(9): phosphorylated serine
SPGLARKRSLFFRKNLLRLTG

SEQ ID NO: 5434 - protein, 21 aa, Artificial Sequence
  Description of Artificial Sequence: Synthetic peptide
  MOD_RES (9)..(9): phosphorylated serine
SPGLARKRSMFFRKNLLRLTG

SEQ ID NO: 5435 - protein, 21 aa, Artificial Sequence
  Description of Artificial Sequence: Synthetic peptide
  MOD_RES (9)..(9): phosphorylated serine
SPGLARKRSVFFRKNLLRLTG

SEQ ID NO: 5436 - protein, 20 aa, Artificial Sequence
  Description of Artificial Sequence: Synthetic peptide
  MOD_RES (4)..(4): phosphorylated serine
SPGSPRPAFFFRKNLLRLTG

SEQ ID NO: 5437 - protein, 20 aa, Artificial Sequence
  Description of Artificial Sequence: Synthetic peptide
  MOD_RES (4)..(4): phosphorylated serine
SPGSPRPALFFRKNLLRLTG

SEQ ID NO: 5438 - protein, 20 aa, Artificial Sequence
  Description of Artificial Sequence: Synthetic peptide
  MOD_RES (4)..(4): phosphorylated serine
SPGSPRPAMFFRKNLLRLTG

SEQ ID NO: 5439 - protein, 20 aa, Artificial Sequence
  Description of Artificial Sequence: Synthetic peptide
  MOD_RES (4)..(4): phosphorylated serine
SPGSPRPAVFFRKNLLRLTG

SEQ ID NO: 5440 - protein, 20 aa, Artificial Sequence
  Description of Artificial Sequence: Synthetic peptide
  MOD_RES (4)..(4): phosphorylated serine
SPKSPGLKAFFRKNLLRLTG

SEQ ID NO: 5441 - protein, 20 aa, Artificial Sequence
  Description of Artificial Sequence: Synthetic peptide
  MOD_RES (4)..(4): phosphorylated serine
SPKSPGLKFFFRKNLLRLTG

SEQ ID NO: 5442 - protein, 20 aa, Artificial Sequence
  Description of Artificial Sequence: Synthetic peptide
  MOD_RES (4)..(4): phosphorylated serine
SPKSPGLKLFFRKNLLRLTG

SEQ ID NO: 5443 - protein, 20 aa, Artificial Sequence
  Description of Artificial Sequence: Synthetic peptide
  MOD_RES (4)..(4): phosphorylated serine
SPKSPGLKMFFRKNLLRLTG

SEQ ID NO: 5444 - protein, 20 aa, Artificial Sequence
  Description of Artificial Sequence: Synthetic peptide
  MOD_RES (4)..(4): phosphorylated serine
SPKSPGLKVFFRKNLLRLTG

SEQ ID NO: 5445 - protein, 20 aa, Artificial Sequence
  Description of Artificial Sequence: Synthetic peptide
  MOD_RES (4)..(4): phosphorylated serine
SPKSPTAAFFFRKNLLRLTG

SEQ ID NO: 5446 - protein, 20 aa, Artificial Sequence
  Description of Artificial Sequence: Synthetic peptide
  MOD_RES (4)..(4): phosphorylated serine
SPKSPTAALFFRKNLLRLTG

SEQ ID NO: 5447 - protein, 20 aa, Artificial Sequence
  Description of Artificial Sequence: Synthetic peptide
  MOD_RES (4)..(4): phosphorylated serine
SPKSPTAAMFFRKNLLRLTG

SEQ ID NO: 5448 - protein, 20 aa, Artificial Sequence
  Description of Artificial Sequence: Synthetic peptide
  MOD_RES (4)..(4): phosphorylated serine
SPKSPTAAVFFRKNLLRLTG

SEQ ID NO: 5449 - protein, 20 aa, Artificial Sequence
  Description of Artificial Sequence: Synthetic peptide
  MOD_RES (8)..(8): phosphorylated serine
SPLTKSISLFFRKNLLRLTG

SEQ ID NO: 5450 - protein, 30 aa, Artificial Sequence
  Description of Artificial Sequence: Synthetic polypeptide
  MOD_RES (1)..(1): phosphorylated serine
SPPFPVPVYTRQAPKQVIKFFRKNLLRLTG

SEQ ID NO: 5451 - protein, 22 aa, Artificial Sequence
  Description of Artificial Sequence: Synthetic peptide
  MOD_RES (7)..(7): phosphorylated serine
SPRAPVSPLKFFFRKNLLRLTG

SEQ ID NO: 5452 - protein, 20 aa, Artificial Sequence
  Description of Artificial Sequence: Synthetic peptide
  MOD_RES (6)..(6): phosphorylated serine
SPRERSPALFFRKNLLRLTG

SEQ ID NO: 5453 - protein, 20 aa, Artificial Sequence
  Description of Artificial Sequence: Synthetic peptide
  MOD_RES (7)..(7): phosphorylated serine
SPRGEASSLFFRKNLLRLTG

SEQ ID NO: 5454 - protein, 20 aa, Artificial Sequence
  Description of Artificial Sequence: Synthetic peptide
  MOD_RES (8)..(8): phosphorylated serine
SPRGEASSLFFRKNLLRLTG

SEQ ID NO: 5455 - protein, 21 aa, Artificial Sequence
  Description of Artificial Sequence: Synthetic peptide
  MOD_RES (7)..(7): phosphorylated serine
SPRPPNSPSIFFRKNLLRLTG

SEQ ID NO: 5456 - protein, 21 aa, Artificial Sequence
  Description of Artificial Sequence: Synthetic peptide
  MOD_RES (5)..(5): phosphorylated serine
SPRRSLGLALFFRKNLLRLTG

SEQ ID NO: 5457 - protein, 21 aa, Artificial Sequence
  Description of Artificial Sequence: Synthetic peptide
  MOD_RES (5)..(5): phosphorylated serine
  MOD_RES (9)..(9): phosphorylated serine
SPRRSRSISFFFRKNLLRLTG

SEQ ID NO: 5458 - protein, 21 aa, Artificial Sequence
  Description of Artificial Sequence: Synthetic peptide
  MOD_RES (5)..(5): phosphorylated serine
SPRRSRSISFFFRKNLLRLTG

SEQ ID NO: 5459 - protein, 21 aa, Artificial Sequence
  Description of Artificial Sequence: Synthetic peptide
  MOD_RES (5)..(5): phosphorylated serine
  MOD_RES (9)..(9): phosphorylated serine
SPRRSRSISLFFRKNLLRLTG

SEQ ID NO: 5460 - protein, 21 aa, Artificial Sequence
  Description of Artificial Sequence: Synthetic peptide
  MOD_RES (5)..(5): phosphorylated serine
SPRRSRSISLFFRKNLLRLTG

SEQ ID NO: 5461 - protein, 21 aa, Artificial Sequence
  Description of Artificial Sequence: Synthetic peptide
  MOD_RES (5)..(5): phosphorylated serine
  MOD_RES (9)..(9): phosphorylated serine
SPRRSRSISMFFRKNLLRLTG

SEQ ID NO: 5462 - protein, 21 aa, Artificial Sequence
  Description of Artificial Sequence: Synthetic peptide
  MOD_RES (5)..(5): phosphorylated serine
SPRRSRSISMFFRKNLLRLTG

SEQ ID NO: 5463 - protein, 21 aa, Artificial Sequence
  Description of Artificial Sequence: Synthetic peptide
  MOD_RES (5)..(5): phosphorylated serine
  MOD_RES (9)..(9): phosphorylated serine
SPRRSRSISVFFRKNLLRLTG

SEQ ID NO: 5464 - protein, 21 aa, Artificial Sequence
  Description of Artificial Sequence: Synthetic peptide
  MOD_RES (5)..(5): phosphorylated serine
SPRRSRSISVFFRKNLLRLTG

SEQ ID NO: 5465 - protein, 20 aa, Artificial Sequence
  Description of Artificial Sequence: Synthetic peptide
  MOD_RES (4)..(4): phosphorylated serine
SPRSITSTFFFRKNLLRLTG

SEQ ID NO: 5466 - protein, 20 aa, Artificial Sequence
  Description of Artificial Sequence: Synthetic peptide
  MOD_RES (4)..(4): phosphorylated serine
SPRSITSTLFFRKNLLRLTG

SEQ ID NO: 5467 - protein, 20 aa, Artificial Sequence
  Description of Artificial Sequence: Synthetic peptide
  MOD_RES (4)..(4): phosphorylated serine
SPRSITSTMFFRKNLLRLTG

SEQ ID NO: 5468 - protein, 20 aa, Artificial Sequence
  Description of Artificial Sequence: Synthetic peptide
  MOD_RES (4)..(4): phosphorylated serine
SPRSITSTPFFRKNLLRLTG

SEQ ID NO: 5469 - protein, 20 aa, Artificial Sequence
  Description of Artificial Sequence: Synthetic peptide
  MOD_RES (4)..(4): phosphorylated serine
SPRSITSTVFFRKNLLRLTG

SEQ ID NO: 5470 - protein, 20 aa, Artificial Sequence
  Description of Artificial Sequence: Synthetic peptide
  MOD_RES (4)..(4): phosphorylated serine
SPRSPDRTLFFRKNLLRLTG

SEQ ID NO: 5471 - protein, 20 aa, Artificial Sequence
  Description of Artificial Sequence: Synthetic peptide
  MOD_RES (4)..(4): phosphorylated serine
SPRSPGKPFFFRKNLLRLTG

SEQ ID NO: 5472 - protein, 20 aa, Artificial Sequence
  Description of Artificial Sequence: Synthetic peptide
  MOD_RES (4)..(4): phosphorylated serine
SPRSPGKPLFFRKNLLRLTG

SEQ ID NO: 5473 - protein, 20 aa, Artificial Sequence
  Description of Artificial Sequence: Synthetic peptide
  MOD_RES (4)..(4): phosphorylated serine
SPRSPGKPMFFRKNLLRLTG

SEQ ID NO: 5474 - protein, 20 aa, Artificial Sequence
  Description of Artificial Sequence: Synthetic peptide
  MOD_RES (4)..(4): phosphorylated serine
SPRSPGKPVFFRKNLLRLTG

SEQ ID NO: 5475 - protein, 20 aa, Artificial Sequence
  Description of Artificial Sequence: Synthetic peptide
  MOD_RES (4)..(4): phosphorylated serine
SPRSPGRSFFFRKNLLRLTG

SEQ ID NO: 5476 - protein, 20 aa, Artificial Sequence
  Description of Artificial Sequence: Synthetic peptide
  MOD_RES (4)..(4): phosphorylated serine
SPRSPGRSIFFRKNLLRLTG

SEQ ID NO: 5477 - protein, 20 aa, Artificial Sequence
  Description of Artificial Sequence: Synthetic peptide
  MOD_RES (4)..(4): phosphorylated serine
SPRSPGRSLFFRKNLLRLTG

SEQ ID NO: 5478 - protein, 20 aa, Artificial Sequence
  Description of Artificial Sequence: Synthetic peptide
  MOD_RES (4)..(4): phosphorylated serine
SPRSPGRSMFFRKNLLRLTG

SEQ ID NO: 5479 - protein, 20 aa, Artificial Sequence
  Description of Artificial Sequence: Synthetic peptide
  MOD_RES (4)..(4): phosphorylated serine
SPRSPGRSVFFRKNLLRLTG

SEQ ID NO: 5480 - protein, 20 aa, Artificial Sequence
  Description of Artificial Sequence: Synthetic peptide
  MOD_RES (4)..(4): phosphorylated serine
  MOD_RES (9)..(9): Any amino acid
SPRSPGRSXFFRKNLLRLTG

SEQ ID NO: 5481 - protein, 20 aa, Artificial Sequence
  Description of Artificial Sequence: Synthetic peptide
  MOD_RES (4)..(4): phosphorylated serine
SPRSPSGLRFFRKNLLRLTG

SEQ ID NO: 5482 - protein, 21 aa, Artificial Sequence
  Description of Artificial Sequence: Synthetic peptide
  MOD_RES (4)..(4): phosphorylated serine
SPRSPSTTYFFFRKNLLRLTG

SEQ ID NO: 5483 - protein, 21 aa, Artificial Sequence
  Description of Artificial Sequence: Synthetic peptide
  MOD_RES (4)..(4): phosphorylated serine
SPRSPSTTYLFFRKNLLRLTG

SEQ ID NO: 5484 - protein, 21 aa, Artificial Sequence
  Description of Artificial Sequence: Synthetic peptide
  MOD_RES (6)..(6): phosphorylated serine
SPRSPSTTYLFFRKNLLRLTG

SEQ ID NO: 5485 - protein, 21 aa, Artificial Sequence
  Description of Artificial Sequence: Synthetic peptide
  MOD_RES (4)..(4): phosphorylated serine
SPRSPSTTYMFFRKNLLRLTG

SEQ ID NO: 5486 - protein, 21 aa, Artificial Sequence
  Description of Artificial Sequence: Synthetic peptide
  MOD_RES (4)..(4): phosphorylated serine
SPRSPSTTYVFFRKNLLRLTG

SEQ ID NO: 5487 - protein, 19 aa, Artificial Sequence
  Description of Artificial Sequence: Synthetic peptide
  MOD_RES (4)..(4): phosphorylated serine
  MOD_RES (5)..(5): phosphorylated serine
SPRSSQLVFFRKNLLRLTG

SEQ ID NO: 5488 - protein, 22 aa, Artificial Sequence
  Description of Artificial Sequence: Synthetic peptide
  MOD_RES (4)..(4): phosphorylated threonine
  MOD_RES (7)..(7): phosphorylated serine
SPRTPVSPVKFFFRKNLLRLTG

SEQ ID NO: 5489 - protein, 22 aa, Artificial Sequence
  Description of Artificial Sequence: Synthetic peptide
  MOD_RES (7)..(7): phosphorylated serine
SPRTPVSPVKFFFRKNLLRLTG

SEQ ID NO: 5490 - protein, 22 aa, Artificial Sequence
  Description of Artificial Sequence: Synthetic peptide
  MOD_RES (4)..(4): phosphorylated threonine
  MOD_RES (7)..(7): phosphorylated serine
SPRTPVSPVKLFFRKNLLRLTG

SEQ ID NO: 5491 - protein, 22 aa, Artificial Sequence
  Description of Artificial Sequence: Synthetic peptide
  MOD_RES (7)..(7): phosphorylated serine
SPRTPVSPVKLFFRKNLLRLTG

SEQ ID NO: 5492 - protein, 22 aa, Artificial Sequence
  Description of Artificial Sequence: Synthetic peptide
  MOD_RES (4)..(4): phosphorylated threonine
  MOD_RES (7)..(7): phosphorylated serine
SPRTPVSPVKMFFRKNLLRLTG

SEQ ID NO: 5493 - protein, 22 aa, Artificial Sequence
  Description of Artificial Sequence: Synthetic peptide
  MOD_RES (7)..(7): phosphorylated serine
SPRTPVSPVKMFFRKNLLRLTG

SEQ ID NO: 5494 - protein, 22 aa, Artificial Sequence
  Description of Artificial Sequence: Synthetic peptide
  MOD_RES (4)..(4): phosphorylated threonine
  MOD_RES (7)..(7): phosphorylated serine
SPRTPVSPVKVFFRKNLLRLTG

SEQ ID NO: 5495 - protein, 22 aa, Artificial Sequence
  Description of Artificial Sequence: Synthetic peptide
  MOD_RES (7)..(7): phosphorylated serine
SPRTPVSPVKVFFRKNLLRLTG

SEQ ID NO: 5496 - protein, 22 aa, Artificial Sequence
  Description of Artificial Sequence: Synthetic peptide
  MOD_RES (4)..(4): phosphorylated serine
SPSSPSVRRQFFFRKNLLRLTG

SEQ ID NO: 5497 - protein, 22 aa, Artificial Sequence
  Description of Artificial Sequence: Synthetic peptide
  MOD_RES (4)..(4): phosphorylated serine
SPSSPSVRRQLFFRKNLLRLTG

SEQ ID NO: 5498 - protein, 22 aa, Artificial Sequence
  Description of Artificial Sequence: Synthetic peptide
  MOD_RES (4)..(4): phosphorylated serine
SPSSPSVRRQMFFRKNLLRLTG

SEQ ID NO: 5499 - protein, 22 aa, Artificial Sequence
  Description of Artificial Sequence: Synthetic peptide
  MOD_RES (4)..(4): phosphorylated serine
SPSSPSVRRQVFFRKNLLRLTG

SEQ ID NO: 5500 - protein, 24 aa, Artificial Sequence
  Description of Artificial Sequence: Synthetic peptide
  MOD_RES (10)..(10): phosphorylated serine
SPSTSRSGGSSRFFFRKNLLRLTG

SEQ ID NO: 5501 - protein, 24 aa, Artificial Sequence
  Description of Artificial Sequence: Synthetic peptide
  MOD_RES (10)..(10): phosphorylated serine
SPSTSRSGGSSRLFFRKNLLRLTG

SEQ ID NO: 5502 - protein, 24 aa, Artificial Sequence
  Description of Artificial Sequence: Synthetic peptide
  MOD_RES (10)..(10): phosphorylated serine
SPSTSRSGGSSRMFFRKNLLRLTG

SEQ ID NO: 5503 - protein, 24 aa, Artificial Sequence
  Description of Artificial Sequence: Synthetic peptide
  MOD_RES (10)..(10): phosphorylated serine
SPSTSRSGGSSRVFFRKNLLRLTG

SEQ ID NO: 5504 - protein, 24 aa, Artificial Sequence
  Description of Artificial Sequence: Synthetic peptide
  MOD_RES (1)..(1): phosphorylated serine
SPTRPNPPVRNLHFFRKNLLRLTG

SEQ ID NO: 5505 - protein, 20 aa, Artificial Sequence
  Description of Artificial Sequence: Synthetic peptide
  MOD_RES (4)..(4): phosphorylated serine
SPVSPMKELFFRKNLLRLTG

SEQ ID NO: 5506 - protein, 21 aa, Artificial Sequence
  Description of Artificial Sequence: Synthetic peptide
  MOD_RES (4)..(4): phosphorylated serine
SPVSTRPLEPFFRKNLLRLTG

SEQ ID NO: 5507 - protein, 21 aa, Artificial Sequence
  Description of Artificial Sequence: Synthetic peptide
  MOD_RES (5)..(5): phosphorylated threonine
SPVSTRPLEPFFRKNLLRLTG

SEQ ID NO: 5508 - protein, 19 aa, Artificial Sequence
  Description of Artificial Sequence: Synthetic peptide
  MOD_RES (7)..(7): phosphorylated serine
SPVVHQSFFFRKNLLRLTG

SEQ ID NO: 5509 - protein, 19 aa, Artificial Sequence
  Description of Artificial Sequence: Synthetic peptide
  MOD_RES (7)..(7): phosphorylated serine
SPVVHQSLFFRKNLLRLTG

SEQ ID NO: 5510 - protein, 19 aa, Artificial Sequence
  Description of Artificial Sequence: Synthetic peptide
  MOD_RES (7)..(7): phosphorylated serine
SPVVHQSMFFRKNLLRLTG

SEQ ID NO: 5511 - protein, 19 aa, Artificial Sequence
  Description of Artificial Sequence: Synthetic peptide
  MOD_RES (7)..(7): phosphorylated serine
SPVVHQSVFFRKNLLRLTG

SEQ ID NO: 5512 - protein, 21 aa, Artificial Sequence
  Description of Artificial Sequence: Synthetic peptide
  MOD_RES (4)..(4): phosphorylated serine
SQISPKSWGVFFRKNLLRLTG

SEQ ID NO: 5513 - protein, 19 aa, Artificial Sequence
  Description of Artificial Sequence: Synthetic peptide
  MOD_RES (6)..(6): phosphorylated serine
SRDKHSEYFFRKNLLRLTG

SEQ ID NO: 5514 - protein, 19 aa, Artificial Sequence
  Description of Artificial Sequence: Synthetic peptide
  MOD_RES (6)..(6): phosphorylated serine
SREKHSEIFFRKNLLRLTG

SEQ ID NO: 5515 - protein, 19 aa, Artificial Sequence
  Description of Artificial Sequence: Synthetic peptide
  MOD_RES (6)..(6): phosphorylated serine
SREKHSELFFRKNLLRLTG

SEQ ID NO: 5516 - protein, 20 aa, Artificial Sequence
  Description of Artificial Sequence: Synthetic peptide
  MOD_RES (8)..(8): phosphorylated serine
SRFNRRVSVFFRKNLLRLTG

SEQ ID NO: 5517 - protein, 19 aa, Artificial Sequence
  Description of Artificial Sequence: Synthetic peptide
  MOD_RES (7)..(7): phosphorylated serine
SRLTHLSFFFRKNLLRLTG

SEQ ID NO: 5518 - protein, 19 aa, Artificial Sequence
  Description of Artificial Sequence: Synthetic peptide
  MOD_RES (7)..(7): phosphorylated serine
SRLTHLSKFFRKNLLRLTG

SEQ ID NO: 5519 - protein, 19 aa, Artificial Sequence
  Description of Artificial Sequence: Synthetic peptide
  MOD_RES (7)..(7): phosphorylated serine
SRLTHLSLFFRKNLLRLTG

SEQ ID NO: 5520 - protein, 19 aa, Artificial Sequence
  Description of Artificial Sequence: Synthetic peptide
  MOD_RES (7)..(7): phosphorylated serine
SRLTHLSMFFRKNLLRLTG

SEQ ID NO: 5521 - protein, 19 aa, Artificial Sequence
  Description of Artificial Sequence: Synthetic peptide
  MOD_RES (7)..(7): phosphorylated serine
SRLTHLSRFFRKNLLRLTG

SEQ ID NO: 5522 - protein, 19 aa, Artificial Sequence
  Description of Artificial Sequence: Synthetic peptide
  MOD_RES (7)..(7): phosphorylated serine
SRLTHLSYFFRKNLLRLTG

SEQ ID NO: 5523 - protein, 20 aa, Artificial Sequence
  Description of Artificial Sequence: Synthetic peptide
  MOD_RES (4)..(4): phosphorylated serine
SRMSPKAQFFFRKNLLRLTG

SEQ ID NO: 5524 - protein, 20 aa, Artificial Sequence
  Description of Artificial Sequence: Synthetic peptide
  MOD_RES (4)..(4): phosphorylated serine
SRMSPKAQKFFRKNLLRLTG

SEQ ID NO: 5525 - protein, 20 aa, Artificial Sequence
  Description of Artificial Sequence: Synthetic peptide
  MOD_RES (4)..(4): phosphorylated serine
SRMSPKAQLFFRKNLLRLTG

SEQ ID NO: 5526 - protein, 20 aa, Artificial Sequence
  Description of Artificial Sequence: Synthetic peptide
  MOD_RES (4)..(4): phosphorylated serine
SRMSPKAQMFFRKNLLRLTG

SEQ ID NO: 5527 - protein, 20 aa, Artificial Sequence
  Description of Artificial Sequence: Synthetic peptide
  MOD_RES (4)..(4): phosphorylated serine
SRMSPKAQRFFRKNLLRLTG

SEQ ID NO: 5528 - protein, 20 aa, Artificial Sequence
  Description of Artificial Sequence: Synthetic peptide
  MOD_RES (4)..(4): phosphorylated serine
SRMSPKAQYFFRKNLLRLTG

SEQ ID NO: 5529 - protein, 21 aa, Artificial Sequence
  Description of Artificial Sequence: Synthetic peptide
  MOD_RES (3)..(3): phosphorylated serine
SRSSRSPYSRFFRKNLLRLTG

SEQ ID NO: 5530 - protein, 20 aa, Artificial Sequence
  Description of Artificial Sequence: Synthetic peptide
  MOD_RES (4)..(4): phosphorylated serine
  MOD_RES (8)..(8): phosphorylated serine
SRSSSVLSLFFRKNLLRLTG

SEQ ID NO: 5531 - protein, 20 aa, Artificial Sequence
  Description of Artificial Sequence: Synthetic peptide
  MOD_RES (5)..(5): phosphorylated serine
SRSSSVLSLFFRKNLLRLTG

SEQ ID NO: 5532 - protein, 20 aa, Artificial Sequence
  Description of Artificial Sequence: Synthetic peptide
  MOD_RES (8)..(8): phosphorylated serine
SRSSSVLSLFFRKNLLRLTG

SEQ ID NO: 5533 - protein, 20 aa, Artificial Sequence
  Description of Artificial Sequence: Synthetic peptide
  MOD_RES (4)..(4): phosphorylated serine
SRTSPITRFFFRKNLLRLTG

SEQ ID NO: 5534 - protein, 20 aa, Artificial Sequence
  Description of Artificial Sequence: Synthetic peptide
  MOD_RES (4)..(4): phosphorylated serine
SRTSPITRKFFRKNLLRLTG

SEQ ID NO: 5535 - protein, 20 aa, Artificial Sequence
  Description of Artificial Sequence: Synthetic peptide
  MOD_RES (4)..(4): phosphorylated serine
SRTSPITRLFFRKNLLRLTG

SEQ ID NO: 5536 - protein, 20 aa, Artificial Sequence
  Description of Artificial Sequence: Synthetic peptide
  MOD_RES (4)..(4): phosphorylated serine
SRTSPITRMFFRKNLLRLTG

SEQ ID NO: 5537 - protein, 20 aa, Artificial Sequence
  Description of Artificial Sequence: Synthetic peptide
  MOD_RES (4)..(4): phosphorylated serine
SRTSPITRRFFRKNLLRLTG

SEQ ID NO: 5538 - protein, 20 aa, Artificial Sequence
  Description of Artificial Sequence: Synthetic peptide
  MOD_RES (4)..(4): phosphorylated serine
SRTSPITRYFFRKNLLRLTG

SEQ ID NO: 5539 - protein, 20 aa, Artificial Sequence
  Description of Artificial Sequence: Synthetic peptide
  MOD_RES (4)..(4): phosphorylated serine
SRWSGSHQFFFRKNLLRLTG

SEQ ID NO: 5540 - protein, 20 aa, Artificial Sequence
  Description of Artificial Sequence: Synthetic peptide
  MOD_RES (4)..(4): phosphorylated serine
SRWSGSHQKFFRKNLLRLTG

SEQ ID NO: 5541 - protein, 20 aa, Artificial Sequence
  Description of Artificial Sequence: Synthetic peptide
  MOD_RES (4)..(4): phosphorylated serine
SRWSGSHQRFFRKNLLRLTG

SEQ ID NO: 5542 - protein, 20 aa, Artificial Sequence
  Description of Artificial Sequence: Synthetic peptide
  MOD_RES (4)..(4): phosphorylated serine
SRWSGSHQYFFRKNLLRLTG

SEQ ID NO: 5543 - protein, 21 aa, Artificial Sequence
  Description of Artificial Sequence: Synthetic peptide
  MOD_RES (4)..(4): phosphorylated serine
  MOD_RES (6)..(6): phosphorylated serine
SRYSRSPYSFFFRKNLLRLTG

SEQ ID NO: 5544 - protein, 21 aa, Artificial Sequence
  Description of Artificial Sequence: Synthetic peptide
  MOD_RES (4)..(4): phosphorylated serine
SRYSRSPYSFFFRKNLLRLTG

SEQ ID NO: 5545 - protein, 21 aa, Artificial Sequence
  Description of Artificial Sequence: Synthetic peptide
  MOD_RES (6)..(6): phosphorylated serine
SRYSRSPYSFFFRKNLLRLTG

SEQ ID NO: 5546 - protein, 21 aa, Artificial Sequence
  Description of Artificial Sequence: Synthetic peptide
  MOD_RES (4)..(4): phosphorylated serine
  MOD_RES (6)..(6): phosphorylated serine
SRYSRSPYSKFFRKNLLRLTG

SEQ ID NO: 5547 - protein, 21 aa, Artificial Sequence
  Description of Artificial Sequence: Synthetic peptide
  MOD_RES (4)..(4): phosphorylated serine
SRYSRSPYSKFFRKNLLRLTG

SEQ ID NO: 5548 - protein, 21 aa, Artificial Sequence
  Description of Artificial Sequence: Synthetic peptide
  MOD_RES (6)..(6): phosphorylated serine
SRYSRSPYSKFFRKNLLRLTG

SEQ ID NO: 5549 - protein, 21 aa, Artificial Sequence
  Description of Artificial Sequence: Synthetic peptide
  MOD_RES (4)..(4): phosphorylated serine
  MOD_RES (6)..(6): phosphorylated serine
SRYSRSPYSLFFRKNLLRLTG

SEQ ID NO: 5550 - protein, 21 aa, Artificial Sequence
  Description of Artificial Sequence: Synthetic peptide
  MOD_RES (4)..(4): phosphorylated serine
SRYSRSPYSLFFRKNLLRLTG

SEQ ID NO: 5551 - protein, 21 aa, Artificial Sequence
  Description of Artificial Sequence: Synthetic peptide
  MOD_RES (6)..(6): phosphorylated serine
SRYSRSPYSLFFRKNLLRLTG

SEQ ID NO: 5552 - protein, 21 aa, Artificial Sequence
  Description of Artificial Sequence: Synthetic peptide
  MOD_RES (4)..(4): phosphorylated serine
  MOD_RES (6)..(6): phosphorylated serine
SRYSRSPYSMFFRKNLLRLTG

SEQ ID NO: 5553 - protein, 21 aa, Artificial Sequence
  Description of Artificial Sequence: Synthetic peptide
  MOD_RES (4)..(4): phosphorylated serine
SRYSRSPYSMFFRKNLLRLTG

SEQ ID NO: 5554 - protein, 21 aa, Artificial Sequence
  Description of Artificial Sequence: Synthetic peptide
  MOD_RES (6)..(6): phosphorylated serine
SRYSRSPYSMFFRKNLLRLTG

SEQ ID NO: 5555 - protein, 21 aa, Artificial Sequence
  Description of Artificial Sequence: Synthetic peptide
  MOD_RES (4)..(4): phosphorylated serine
  MOD_RES (6)..(6): phosphorylated serine
SRYSRSPYSRFFRKNLLRLTG

SEQ ID NO: 5556 - protein, 21 aa, Artificial Sequence
  Description of Artificial Sequence: Synthetic peptide
  MOD_RES (4)..(4): phosphorylated serine
SRYSRSPYSRFFRKNLLRLTG

SEQ ID NO: 5557 - protein, 21 aa, Artificial Sequence
  Description of Artificial Sequence: Synthetic peptide
  MOD_RES (6)..(6): phosphorylated serine
SRYSRSPYSRFFRKNLLRLTG

SEQ ID NO: 5558 - protein, 21 aa, Artificial Sequence
  Description of Artificial Sequence: Synthetic peptide
  MOD_RES (4)..(4): phosphorylated serine
  MOD_RES (6)..(6): phosphorylated serine
SRYSRSPYSYFFRKNLLRLTG

SEQ ID NO: 5559 - protein, 21 aa, Artificial Sequence
  Description of Artificial Sequence: Synthetic peptide
  MOD_RES (4)..(4): phosphorylated serine
SRYSRSPYSYFFRKNLLRLTG

SEQ ID NO: 5560 - protein, 21 aa, Artificial Sequence
  Description of Artificial Sequence: Synthetic peptide
  MOD_RES (6)..(6): phosphorylated serine
SRYSRSPYSYFFRKNLLRLTG

SEQ ID NO: 5561 - protein, 22 aa, Artificial Sequence
  Description of Artificial Sequence: Synthetic peptide
  MOD_RES (4)..(4): phosphorylated serine
  MOD_RES (6)..(6): phosphorylated threonine
  MOD_RES (7)..(7): phosphorylated serine
SRYSRTSPYSRFFRKNLLRLTG

SEQ ID NO: 5562 - protein, 20 aa, Artificial Sequence
  Description of Artificial Sequence: Synthetic peptide
  MOD_RES (5)..(5): phosphorylated serine
SSDISPTRLFFRKNLLRLTG

SEQ ID NO: 5563 - protein, 20 aa, Artificial Sequence
  Description of Artificial Sequence: Synthetic peptide
  MOD_RES (5)..(5): phosphorylated serine
SSDISPTRYFFRKNLLRLTG

SEQ ID NO: 5564 - protein, 19 aa, Artificial Sequence
  Description of Artificial Sequence: Synthetic peptide
  MOD_RES (6)..(6): phosphorylated serine
SSDKHSEYFFRKNLLRLTG

SEQ ID NO: 5565 - protein, 21 aa, Artificial Sequence
  Description of Artificial Sequence: Synthetic peptide
  MOD_RES (9)..(9): phosphorylated serine
SSDPASQLSYFFRKNLLRLTG

SEQ ID NO: 5566 - protein, 20 aa, Artificial Sequence
  Description of Artificial Sequence: Synthetic peptide
  MOD_RES (4)..(4): phosphorylated serine
SSDSETLRYFFRKNLLRLTG

SEQ ID NO: 5567 - protein, 19 aa, Artificial Sequence
  Description of Artificial Sequence: Synthetic peptide
  MOD_RES (4)..(4): phosphorylated serine
SSDSPQKLFFRKNLLRLTG

SEQ ID NO: 5568 - protein, 19 aa, Artificial Sequence
  Description of Artificial Sequence: Synthetic peptide
  MOD_RES (4)..(4): phosphorylated serine
SSDSPQKYFFRKNLLRLTG

SEQ ID NO: 5569 - protein, 21 aa, Artificial Sequence
  Description of Artificial Sequence: Synthetic peptide
  MOD_RES (4)..(4): phosphorylated serine
SSDSPSYVLYFFRKNLLRLTG

SEQ ID NO: 5570 - protein, 21 aa, Artificial Sequence
  Description of Artificial Sequence: Synthetic peptide
  MOD_RES (4)..(4): phosphorylated serine
SSDSPTNHFFFFRKNLLRLTG

SEQ ID NO: 5571 - protein, 20 aa, Artificial Sequence
  Description of Artificial Sequence: Synthetic peptide
  MOD_RES (5)..(5): phosphorylated serine
SSEISPTRYFFRKNLLRLTG

SEQ ID NO: 5572 - protein, 19 aa, Artificial Sequence
  Description of Artificial Sequence: Synthetic peptide
  MOD_RES (6)..(6): phosphorylated serine
SSEKHSEYFFRKNLLRLTG

SEQ ID NO: 5573 - protein, 21 aa, Artificial Sequence
  Description of Artificial Sequence: Synthetic peptide
  MOD_RES (9)..(9): phosphorylated serine
SSEPASQLSYFFRKNLLRLTG

SEQ ID NO: 5574 - protein, 20 aa, Artificial Sequence
  Description of Artificial Sequence: Synthetic peptide
  MOD_RES (4)..(4): phosphorylated serine
SSESETLRYFFRKNLLRLTG

SEQ ID NO: 5575 - protein, 19 aa, Artificial Sequence
  Description of Artificial Sequence: Synthetic peptide
  MOD_RES (4)..(4): phosphorylated serine
SSESPQKLFFRKNLLRLTG

SEQ ID NO: 5576 - protein, 19 aa, Artificial Sequence
  Description of Artificial Sequence: Synthetic peptide
  MOD_RES (4)..(4): phosphorylated serine
SSESPQKYFFRKNLLRLTG

SEQ ID NO: 5577 - protein, 21 aa, Artificial Sequence
  Description of Artificial Sequence: Synthetic peptide
  MOD_RES (4)..(4): phosphorylated serine
SSESPSYVLYFFRKNLLRLTG

SEQ ID NO: 5578 - protein, 21 aa, Artificial Sequence
  Description of Artificial Sequence: Synthetic peptide
  MOD_RES (4)..(4): phosphorylated serine
SSESPTNHFYFFRKNLLRLTG

SEQ ID NO: 5579 - protein, 28 aa, Artificial Sequence
  Description of Artificial Sequence: Synthetic peptide
  MOD_RES (11)..(11): phosphorylated serine
SSNGKMASRRSEEKEAGFFRKNLLRLTG

SEQ ID NO: 5580 - protein, 30 aa, Artificial Sequence
  Description of Artificial Sequence: Synthetic polypeptide
  MOD_RES (11)..(11): phosphorylated serine
SSNGKMASRRSEEKEAGEIFFRKNLLRLTG

SEQ ID NO: 5581 - protein, 22 aa, Artificial Sequence
  Description of Artificial Sequence: Synthetic peptide
  MOD_RES (2)..(2): phosphorylated serine
SSPIMRKKVSLFFRKNLLRLTG

SEQ ID NO: 5582 - protein, 31 aa, Artificial Sequence
  Description of Artificial Sequence: Synthetic polypeptide
  MOD_RES (1)..(1): phosphorylated serine
SSPPFPVPVYTRQAPKQVIKFFRKNLLRLTG

SEQ ID NO: 5583 - protein, 23 aa, Artificial Sequence
  Description of Artificial Sequence: Synthetic peptide
  MOD_RES (3)..(3): phosphorylated serine
SSSPTHAKSAHVFFRKNLLRLTG

SEQ ID NO: 5584 - protein, 27 aa, Artificial Sequence
  Description of Artificial Sequence: Synthetic peptide
  MOD_RES (3)..(3): phosphorylated serine
SSSWRILGSKQSEHRPFFRKNLLRLTG

SEQ ID NO: 5585 - protein, 20 aa, Artificial Sequence
  Description of Artificial Sequence: Synthetic peptide
  MOD_RES (5)..(5): phosphorylated serine
STDISPTRLFFRKNLLRLTG

SEQ ID NO: 5586 - protein, 20 aa, Artificial Sequence
  Description of Artificial Sequence: Synthetic peptide
  MOD_RES (5)..(5): phosphorylated serine
STDISPTRYFFRKNLLRLTG

SEQ ID NO: 5587 - protein, 19 aa, Artificial Sequence
  Description of Artificial Sequence: Synthetic peptide
  MOD_RES (6)..(6): phosphorylated serine
STDKHSEYFFRKNLLRLTG

SEQ ID NO: 5588 - protein, 21 aa, Artificial Sequence
  Description of Artificial Sequence: Synthetic peptide
  MOD_RES (9)..(9): phosphorylated serine
STDPASQLSYFFRKNLLRLTG

SEQ ID NO: 5589 - protein, 20 aa, Artificial Sequence
  Description of Artificial Sequence: Synthetic peptide
  MOD_RES (4)..(4): phosphorylated serine
STDSETLRYFFRKNLLRLTG

SEQ ID NO: 5590 - protein, 19 aa, Artificial Sequence
  Description of Artificial Sequence: Synthetic peptide
  MOD_RES (4)..(4): phosphorylated serine
STDSPQKYFFRKNLLRLTG

SEQ ID NO: 5591 - protein, 21 aa, Artificial Sequence
  Description of Artificial Sequence: Synthetic peptide
  MOD_RES (4)..(4): phosphorylated serine
STDSPSYVLYFFRKNLLRLTG

SEQ ID NO: 5592 - protein, 21 aa, Artificial Sequence
  Description of Artificial Sequence: Synthetic peptide
  MOD_RES (4)..(4): phosphorylated serine
STDSPTNHFYFFRKNLLRLTG

SEQ ID NO: 5593 - protein, 20 aa, Artificial Sequence
  Description of Artificial Sequence: Synthetic peptide
  MOD_RES (5)..(5): phosphorylated serine
STEISPTRLFFRKNLLRLTG

SEQ ID NO: 5594 - protein, 20 aa, Artificial Sequence
  Description of Artificial Sequence: Synthetic peptide
  MOD_RES (5)..(5): phosphorylated serine
STEISPTRYFFRKNLLRLTG

SEQ ID NO: 5595 - protein, 19 aa, Artificial Sequence
  Description of Artificial Sequence: Synthetic peptide
  MOD_RES (6)..(6): phosphorylated serine
STEKHSEYFFRKNLLRLTG

SEQ ID NO: 5596 - protein, 21 aa, Artificial Sequence
  Description of Artificial Sequence: Synthetic peptide
  MOD_RES (9)..(9): phosphorylated serine
STEPASQLSYFFRKNLLRLTG

SEQ ID NO: 5597 - protein, 20 aa, Artificial Sequence
  Description of Artificial Sequence: Synthetic peptide
  MOD_RES (4)..(4): phosphorylated serine
STESETLRYFFRKNLLRLTG

SEQ ID NO: 5598 - protein, 19 aa, Artificial Sequence
  Description of Artificial Sequence: Synthetic peptide
  MOD_RES (4)..(4): phosphorylated serine
STESPQKYFFRKNLLRLTG

SEQ ID NO: 5599 - protein, 21 aa, Artificial Sequence
  Description of Artificial Sequence: Synthetic peptide
  MOD_RES (4)..(4): phosphorylated serine
STESPSYVLYFFRKNLLRLTG

SEQ ID NO: 5600 - protein, 21 aa, Artificial Sequence
  Description of Artificial Sequence: Synthetic peptide
  MOD_RES (4)..(4): phosphorylated serine
STESPTNHFYFFRKNLLRLTG

SEQ ID NO: 5601 - protein, 21 aa, Artificial Sequence
  Description of Artificial Sequence: Synthetic peptide
  MOD_RES (6)..(6): phosphorylated serine
STIQNSPTKKFFRKNLLRLTG

SEQ ID NO: 5602 - protein, 21 aa, Artificial Sequence
  Description of Artificial Sequence: Synthetic peptide
  MOD_RES (1)..(1): phosphorylated serine
STMSLNIITVFFRKNLLRLTG

SEQ ID NO: 5603 - protein, 21 aa, Artificial Sequence
  Description of Artificial Sequence: Synthetic peptide
  MOD_RES (4)..(4): phosphorylated serine
STMSLNIITVFFRKNLLRLTG

SEQ ID NO: 5604 - protein, 20 aa, Artificial Sequence
  Description of Artificial Sequence: Synthetic peptide
  MOD_RES (5)..(5): phosphorylated serine
SVDISPIRLFFRKNLLRLTG

SEQ ID NO: 5605 - protein, 20 aa, Artificial Sequence
  Description of Artificial Sequence: Synthetic peptide
  MOD_RES (5)..(5): phosphorylated serine
SVDISPTRLFFRKNLLRLTG

SEQ ID NO: 5606 - protein, 20 aa, Artificial Sequence
  Description of Artificial Sequence: Synthetic peptide
  MOD_RES (5)..(5): phosphorylated serine
SVDISPTRYFFRKNLLRLTG

SEQ ID NO: 5607 - protein, 20 aa, Artificial Sequence
  Description of Artificial Sequence: Synthetic peptide
  MOD_RES (4)..(4): phosphorylated serine
SVFSPSFGLFFRKNLLRLTG

SEQ ID NO: 5608 - protein, 21 aa, Artificial Sequence
  Description of Artificial Sequence: Synthetic peptide
  MOD_RES (4)..(4): phosphorylated serine
SVGSDYYIQLFFRKNLLRLTG

SEQ ID NO: 5609 - protein, 20 aa, Artificial Sequence
  Description of Artificial Sequence: Synthetic peptide
  MOD_RES (8)..(8): phosphorylated serine
SVKPRRTSLFFRKNLLRLTG

SEQ ID NO: 5610 - protein, 20 aa, Artificial Sequence
  Description of Artificial Sequence: Synthetic peptide
  MOD_RES (4)..(4): phosphorylated serine
SVKSPVTVKFFRKNLLRLTG

SEQ ID NO: 5611 - protein, 20 aa, Artificial Sequence
  Description of Artificial Sequence: Synthetic peptide
  MOD_RES (4)..(4): phosphorylated serine
SVKSPVTVYFFRKNLLRLTG

SEQ ID NO: 5612 - protein, 20 aa, Artificial Sequence
  Description of Artificial Sequence: Synthetic peptide
  MOD_RES (4)..(4): phosphorylated serine
SVLSPSFQLFFRKNLLRLTG

SEQ ID NO: 5613 - protein, 20 aa, Artificial Sequence
  Description of Artificial Sequence: Synthetic peptide
  MOD_RES (5)..(5): phosphorylated serine
SVMDSPKKLFFRKNLLRLTG

SEQ ID NO: 5614 - protein, 20 aa, Artificial Sequence
  Description of Artificial Sequence: Synthetic peptide
  MOD_RES (5)..(5): phosphorylated serine
SVRRSVLMKFFRKNLLRLTG

SEQ ID NO: 5615 - protein, 20 aa, Artificial Sequence
  Description of Artificial Sequence: Synthetic peptide
  MOD_RES (5)..(5): phosphorylated serine
SVRRSVLMYFFRKNLLRLTG

SEQ ID NO: 5616 - protein, 20 aa, Artificial Sequence
  Description of Artificial Sequence: Synthetic peptide
  MOD_RES (4)..(4): phosphorylated serine
SVRSLSLSLFFRKNLLRLTG

SEQ ID NO: 5617 - protein, 23 aa, Artificial Sequence
  Description of Artificial Sequence: Synthetic peptide
  MOD_RES (4)..(4): phosphorylated serine
SVYSGDFGNLEVFFRKNLLRLTG

SEQ ID NO: 5618 - protein, 20 aa, Artificial Sequence
  Description of Artificial Sequence: Synthetic peptide
  MOD_RES (4)..(4): phosphorylated serine
SVYSPVKKKFFRKNLLRLTG

SEQ ID NO: 5619 - protein, 20 aa, Artificial Sequence
  Description of Artificial Sequence: Synthetic peptide
  MOD_RES (4)..(4): phosphorylated serine
SVYSPVKKYFFRKNLLRLTG

SEQ ID NO: 5620 - protein, 20 aa, Artificial Sequence
  Description of Artificial Sequence: Synthetic peptide
  MOD_RES (1)..(1): phosphorylated serine
SYIEHIFEIFFRKNLLRLTG

SEQ ID NO: 5621 - protein, 21 aa, Artificial Sequence
  Description of Artificial Sequence: Synthetic peptide
  MOD_RES (4)..(4): phosphorylated serine
SYPSPVATSYFFRKNLLRLTG

SEQ ID NO: 5622 - protein, 20 aa, Artificial Sequence
  Description of Artificial Sequence: Synthetic peptide
  MOD_RES (1)..(1): phosphorylated serine
SYQKVIELFFFRKNLLRLTG

SEQ ID NO: 5623 - protein, 19 aa, Artificial Sequence
  Description of Artificial Sequence: Synthetic peptide
  MOD_RES (5)..(5): phosphorylated serine
TDKYSKMMFFRKNLLRLTG

SEQ ID NO: 5624 - protein, 20 aa, Artificial Sequence
  Description of Artificial Sequence: Synthetic peptide
  MOD_RES (4)..(4): phosphorylated serine
TEASPESMLFFRKNLLRLTG

SEQ ID NO: 5625 - protein, 31 aa, Artificial Sequence
  Description of Artificial Sequence: Synthetic polypeptide
  MOD_RES (18)..(18): phosphorylated serine
  MOD_RES (19)..(19): phosphorylated serine
THKGEIRGASTPFQFRASSPFFRKNLLRLTG

SEQ ID NO: 5626 - protein, 26 aa, Artificial Sequence
  Description of Artificial Sequence: Synthetic peptide
  MOD_RES (9)..(9): phosphorylated serine
TIGEKKEPSDKSVDSFFRKNLLRLTG

SEQ ID NO: 5627 - protein, 29 aa, Artificial Sequence
  Description of Artificial Sequence: Synthetic peptide
  MOD_RES (15)..(15): phosphorylated serine
TKDKYMASRGQKAKSMEGFFRKNLLRLTG

SEQ ID NO: 5628 - protein, 25 aa, Artificial Sequence
  Description of Artificial Sequence: Synthetic peptide
  MOD_RES (3)..(3): phosphorylated serine
TKSVKALSSLHGDDFFRKNLLRLTG

SEQ ID NO: 5629 - protein, 26 aa, Artificial Sequence
  Description of Artificial Sequence: Synthetic peptide
  MOD_RES (3)..(3): phosphorylated serine
TKSVKALSSLHGDDQFFRKNLLRLTG

SEQ ID NO: 5630 - protein, 27 aa, Artificial Sequence
  Description of Artificial Sequence: Synthetic peptide
  MOD_RES (3)..(3): phosphorylated serine
TKSVKALSSLHGDDQDFFRKNLLRLTG

SEQ ID NO: 5631 - protein, 22 aa, Artificial Sequence
  Description of Artificial Sequence: Synthetic peptide
  MOD_RES (4)..(4): phosphorylated serine
TLASPSVFKSTFFRKNLLRLTG

SEQ ID NO: 5632 - protein, 22 aa, Artificial Sequence
  Description of Artificial Sequence: Synthetic peptide
  MOD_RES (4)..(4): phosphorylated serine
TLASPSVFKSVFFRKNLLRLTG

SEQ ID NO: 5633 - protein, 20 aa, Artificial Sequence
  Description of Artificial Sequence: Synthetic peptide
  MOD_RES (5)..(5): phosphorylated serine
TLLASPMLKFFRKNLLRLTG

SEQ ID NO: 5634 - protein, 20 aa, Artificial Sequence
  Description of Artificial Sequence: Synthetic peptide
  MOD_RES (8)..(8): phosphorylated serine
TLMERTVSLFFRKNLLRLTG

SEQ ID NO: 5635 - protein, 20 aa, Artificial Sequence
  Description of Artificial Sequence: Synthetic peptide
  MOD_RES (4)..(4): phosphorylated serine
TLSSPPPGLFFRKNLLRLTG

SEQ ID NO: 5636 - protein, 21 aa, Artificial Sequence
  Description of Artificial Sequence: Synthetic peptide
  MOD_RES (4)..(4): phosphorylated serine
TMASPGKDNYFFRKNLLRLTG

SEQ ID NO: 5637 - protein, 22 aa, Artificial Sequence
  Description of Artificial Sequence: Synthetic peptide
  MOD_RES (4)..(4): phosphorylated serine
TMASPSVFKSTFFRKNLLRLTG

SEQ ID NO: 5638 - protein, 22 aa, Artificial Sequence
  Description of Artificial Sequence: Synthetic peptide
  MOD_RES (4)..(4): phosphorylated serine
TMASPSVFKSVFFRKNLLRLTG

SEQ ID NO: 5639 - protein, 21 aa, Artificial Sequence
  Description of Artificial Sequence: Synthetic peptide
  MOD_RES (4)..(4): phosphorylated serine
TMDSPGKDNYFFRKNLLRLTG

SEQ ID NO: 5640 - protein, 21 aa, Artificial Sequence
  Description of Artificial Sequence: Synthetic peptide
  MOD_RES (4)..(4): phosphorylated serine
TMESPGKDNYFFRKNLLRLTG

SEQ ID NO: 5641 - protein, 20 aa, Artificial Sequence
  Description of Artificial Sequence: Synthetic peptide
  MOD_RES (4)..(4): phosphorylated serine
TMMSPSQFLFFRKNLLRLTG

SEQ ID NO: 5642 - protein, 21 aa, Artificial Sequence
  Description of Artificial Sequence: Synthetic peptide
  MOD_RES (9)..(9): phosphorylated serine
TPAQPQRRSFFFRKNLLRLTG

SEQ ID NO: 5643 - protein, 21 aa, Artificial Sequence
  Description of Artificial Sequence: Synthetic peptide
  MOD_RES (9)..(9): phosphorylated serine
TPAQPQRRSLFFRKNLLRLTG

SEQ ID NO: 5644 - protein, 21 aa, Artificial Sequence
  Description of Artificial Sequence: Synthetic peptide
  MOD_RES (9)..(9): phosphorylated serine
TPAQPQRRSMFFRKNLLRLTG

SEQ ID NO: 5645 - protein, 21 aa, Artificial Sequence
  Description of Artificial Sequence: Synthetic peptide
  MOD_RES (9)..(9): phosphorylated serine
TPAQPQRRSVFFRKNLLRLTG

SEQ ID NO: 5646 - protein, 30 aa, Artificial Sequence
  Description of Artificial Sequence: Synthetic polypeptide
  MOD_RES (12)..(12): phosphorylated serine
TPDPSKFFSQLSSEHGGDVFFRKNLLRLTG

SEQ ID NO: 5647 - protein, 31 aa, Artificial Sequence
  Description of Artificial Sequence: Synthetic polypeptide
  MOD_RES (1)..(1): phosphorylated threonine
TPDPSKFFSQLSSEHGGDVQFFRKNLLRLTG

SEQ ID NO: 5648 - protein, 22 aa, Artificial Sequence
  Description of Artificial Sequence: Synthetic peptide
  MOD_RES (4)..(4): phosphorylated serine
TPISPGRASGFFFRKNLLRLTG

SEQ ID NO: 5649 - protein, 22 aa, Artificial Sequence
  Description of Artificial Sequence: Synthetic peptide
  MOD_RES (4)..(4): phosphorylated serine
TPISPGRASGLFFRKNLLRLTG

SEQ ID NO: 5650 - protein, 22 aa, Artificial Sequence
  Description of Artificial Sequence: Synthetic peptide
  MOD_RES (4)..(4): phosphorylated serine
TPISPGRASGMFFRKNLLRLTG

SEQ ID NO: 5651 - protein, 22 aa, Artificial Sequence
  Description of Artificial Sequence: Synthetic peptide
  MOD_RES (4)..(4): phosphorylated serine
TPISPGRASGVFFRKNLLRLTG

SEQ ID NO: 5652 - protein, 20 aa, Artificial Sequence
  Description of Artificial Sequence: Synthetic peptide
  MOD_RES (8)..(8): phosphorylated serine
TPMKKHLSLFFRKNLLRLTG

SEQ ID NO: 5653 - protein, 20 aa, Artificial Sequence
  Description of Artificial Sequence: Synthetic peptide
  MOD_RES (4)..(4): phosphorylated serine
TPRSPPLGFFFRKNLLRLTG

SEQ ID NO: 5654 - protein, 20 aa, Artificial Sequence
  Description of Artificial Sequence: Synthetic peptide
  MOD_RES (4)..(4): phosphorylated serine
TPRSPPLGLFFRKNLLRLTG

SEQ ID NO: 5655 - protein, 21 aa, Artificial Sequence
  Description of Artificial Sequence: Synthetic peptide
  MOD_RES (4)..(4): phosphorylated serine
TPRSPPLGLFFFRKNLLRLTG

SEQ ID NO: 5656 - protein, 21 aa, Artificial Sequence
  Description of Artificial Sequence: Synthetic peptide
  MOD_RES (4)..(4): phosphorylated serine
TPRSPPLGLIFFRKNLLRLTG

SEQ ID NO: 5657 - protein, 21 aa, Artificial Sequence
  Description of Artificial Sequence: Synthetic peptide
  MOD_RES (4)..(4): phosphorylated serine
TPRSPPLGLLFFRKNLLRLTG

SEQ ID NO: 5658 - protein, 21 aa, Artificial Sequence
  Description of Artificial Sequence: Synthetic peptide
  MOD_RES (4)..(4): phosphorylated serine
TPRSPPLGLMFFRKNLLRLTG

SEQ ID NO: 5659 - protein, 21 aa, Artificial Sequence
  Description of Artificial Sequence: Synthetic peptide
  MOD_RES (4)..(4): phosphorylated serine
TPRSPPLGLVFFRKNLLRLTG

SEQ ID NO: 5660 - protein, 20 aa, Artificial Sequence
  Description of Artificial Sequence: Synthetic peptide
  MOD_RES (4)..(4): phosphorylated serine
TPRSPPLGMFFRKNLLRLTG

SEQ ID NO: 5661 - protein, 20 aa, Artificial Sequence
  Description of Artificial Sequence: Synthetic peptide
  MOD_RES (4)..(4): phosphorylated serine
TPRSPPLGVFFRKNLLRLTG

SEQ ID NO: 5662 - protein, 20 aa, Artificial Sequence
  Description of Artificial Sequence: Synthetic peptide
  MOD_RES (7)..(7): phosphorylated serine
TQSSGKSSVFFRKNLLRLTG

SEQ ID NO: 5663 - protein, 20 aa, Artificial Sequence
  Description of Artificial Sequence: Synthetic peptide
  MOD_RES (4)..(4): phosphorylated threonine
TRKTPESFLFFRKNLLRLTG

SEQ ID NO: 5664 - protein, 22 aa, Artificial Sequence
  Description of Artificial Sequence: Synthetic peptide
  MOD_RES (4)..(4): phosphorylated serine
TRLSPAKIVLFFFRKNLLRLTG

SEQ ID NO: 5665 - protein, 22 aa, Artificial Sequence
  Description of Artificial Sequence: Synthetic peptide
  MOD_RES (4)..(4): phosphorylated serine
TRLSPAKIVLKFFRKNLLRLTG

SEQ ID NO: 5666 - protein, 22 aa, Artificial Sequence
  Description of Artificial Sequence: Synthetic peptide
  MOD_RES (4)..(4): phosphorylated serine
TRLSPAKIVLRFFRKNLLRLTG

SEQ ID NO: 5667 - protein, 22 aa, Artificial Sequence
  Description of Artificial Sequence: Synthetic peptide
  MOD_RES (4)..(4): phosphorylated serine
TRLSPAKIVLYFFRKNLLRLTG

SEQ ID NO: 5668 - protein, 21 aa, Artificial Sequence
  Description of Artificial Sequence: Synthetic peptide
  MOD_RES (4)..(4): phosphorylated serine
TSASPGKDNYFFRKNLLRLTG

SEQ ID NO: 5669 - protein, 21 aa, Artificial Sequence
  Description of Artificial Sequence: Synthetic peptide
  MOD_RES (4)..(4): phosphorylated serine
TSDSPGKDNYFFRKNLLRLTG

SEQ ID NO: 5670 - protein, 22 aa, Artificial Sequence
  Description of Artificial Sequence: Synthetic peptide
  MOD_RES (4)..(4): phosphorylated threonine
TSDTPDYLLKYFFRKNLLRLTG

SEQ ID NO: 5671 - protein, 21 aa, Artificial Sequence
  Description of Artificial Sequence: Synthetic peptide
  MOD_RES (4)..(4): phosphorylated serine
TSESPGKDNYFFRKNLLRLTG

SEQ ID NO: 5672 - protein, 22 aa, Artificial Sequence
  Description of Artificial Sequence: Synthetic peptide
  MOD_RES (4)..(4): phosphorylated threonine
TSETPDYLLKYFFRKNLLRLTG

SEQ ID NO: 5673 - protein, 21 aa, Artificial Sequence
  Description of Artificial Sequence: Synthetic peptide
  MOD_RES (4)..(4): phosphorylated serine
TTASPGKDNYFFRKNLLRLTG

SEQ ID NO: 5674 - protein, 21 aa, Artificial Sequence
  Description of Artificial Sequence: Synthetic peptide
  MOD_RES (4)..(4): phosphorylated serine
TTDSPGKDNYFFRKNLLRLTG

SEQ ID NO: 5675 - protein, 22 aa, Artificial Sequence
  Description of Artificial Sequence: Synthetic peptide
  MOD_RES (4)..(4): phosphorylated threonine
TTDTPDYLLKYFFRKNLLRLTG

SEQ ID NO: 5676 - protein, 21 aa, Artificial Sequence
  Description of Artificial Sequence: Synthetic peptide
  MOD_RES (4)..(4): phosphorylated serine
TTESPGKDNYFFRKNLLRLTG

SEQ ID NO: 5677 - protein, 22 aa, Artificial Sequence
  Description of Artificial Sequence: Synthetic peptide
  MOD_RES (4)..(4): phosphorylated threonine
TTETPDYLLKYFFRKNLLRLTG

SEQ ID NO: 5678 - protein, 24 aa, Artificial Sequence
  Description of Artificial Sequence: Synthetic peptide
  MOD_RES (4)..(4): phosphorylated serine
TTKSVKALSSLHGFFRKNLLRLTG

SEQ ID NO: 5679 - protein, 26 aa, Artificial Sequence
  Description of Artificial Sequence: Synthetic peptide
  MOD_RES (4)..(4): phosphorylated serine
TTKSVKALSSLHGDDFFRKNLLRLTG

SEQ ID NO: 5680 - protein, 27 aa, Artificial Sequence
  Description of Artificial Sequence: Synthetic peptide
  MOD_RES (4)..(4): phosphorylated serine
TTKSVKALSSLHGDDQFFRKNLLRLTG

SEQ ID NO: 5681 - protein, 28 aa, Artificial Sequence
  Description of Artificial Sequence: Synthetic peptide
  MOD_RES (4)..(4): phosphorylated serine
TTKSVKALSSLHGDDQDFFRKNLLRLTG

SEQ ID NO: 5682 - protein, 29 aa, Artificial Sequence
  Description of Artificial Sequence: Synthetic peptide
  MOD_RES (4)..(4): phosphorylated serine
TTKSVKALSSLHGDDQDSFFRKNLLRLTG

SEQ ID NO: 5683 - protein, 31 aa, Artificial Sequence
  Description of Artificial Sequence: Synthetic polypeptide
  MOD_RES (4)..(4): phosphorylated serine
  MOD_RES (18)..(18): phosphorylated serine
TTKSVKALSSLHGDDQDSEDFFRKNLLRLTG

SEQ ID NO: 5684 - protein, 31 aa, Artificial Sequence; identical to SEQ ID NO: 5683
  Description of Artificial Sequence: Synthetic polypeptide
  MOD_RES (18)..(18): phosphorylated serine

SEQ ID NO: 5685 - protein, 32 aa, Artificial Sequence
  Description of Artificial Sequence: Synthetic polypeptide
  MOD_RES (4)..(4): phosphorylated serine
  MOD_RES (18)..(18): phosphorylated serine
TTKSVKALSSLHGDDQDSEDEFFRKNLLRLTG

SEQ ID NO: 5686 - protein, 32 aa, Artificial Sequence; identical to SEQ ID NO: 5685
  Description of Artificial Sequence: Synthetic polypeptide
  MOD_RES (18)..(18): phosphorylated serine

SEQ ID NO: 5687 - protein, 21 aa, Artificial Sequence
  Description of Artificial Sequence: Synthetic peptide
  MOD_RES (4)..(4): phosphorylated serine
TVFSPTLPAAFFRKNLLRLTG

SEQ ID NO: 5688 - protein, 22 aa, Artificial Sequence
  Description of Artificial Sequence: Synthetic peptide
  MOD_RES (4)..(4): phosphorylated serine
TVMSNSSVIHLFFRKNLLRLTG

SEQ ID NO: 5689 - protein, 18 aa, Artificial Sequence
  Description of Artificial Sequence: Synthetic peptide
  MOD_RES (6)..(6): phosphorylated serine
VAKRLSLFFRKNLLRLTG

SEQ ID NO: 5690 - protein, 38 aa, Artificial Sequence
  Description of Artificial Sequence: Synthetic polypeptide
  MOD_RES (13)..(13): phosphorylated serine
VAMPVKKSPRRSSSDEQGLSYSSLKNVFFRKNLLRLTG

SEQ ID NO: 5691 - protein, 21 aa, Artificial Sequence
  Description of Artificial Sequence: Synthetic peptide
  MOD_RES (4)..(4): phosphorylated serine
VIDSQELSKVFFRKNLLRLTG

SEQ ID NO: 5692 - protein, 20 aa, Artificial Sequence
  Description of Artificial Sequence: Synthetic peptide
  MOD_RES (4)..(4): phosphorylated serine
VLDSPASKKFFRKNLLRLTG

SEQ ID NO: 5693 - protein, 21 aa, Artificial Sequence
  Description of Artificial Sequence: Synthetic peptide
  MOD_RES (6)..(6): phosphorylated serine
VLFPESPARAFFRKNLLRLTG

SEQ ID NO: 5694 - protein, 21 aa, Artificial Sequence
  Description of Artificial Sequence: Synthetic peptide
  MOD_RES (5)..(5): phosphorylated threonine
VLFRTPLASVFFRKNLLRLTG

SEQ ID NO: 5695 - protein, 20 aa, Artificial Sequence
  Description of Artificial Sequence: Synthetic peptide
  MOD_RES (4)..(4): phosphorylated serine
VLFSSPPQMFFRKNLLRLTG

SEQ ID NO: 5696 - protein, 20 aa, Artificial Sequence
  Description of Artificial Sequence: Synthetic peptide
  MOD_RES (5)..(5): phosphorylated serine
VLFSSPPQMFFRKNLLRLTG

SEQ ID NO: 5697 - protein, 20 aa, Artificial Sequence
  Description of Artificial Sequence: Synthetic peptide
  MOD_RES (8)..(8): phosphorylated serine
VLIENVASLFFRKNLLRLTG

SEQ ID NO: 5698 - protein, 20 aa, Artificial Sequence
  Description of Artificial Sequence: Synthetic peptide
  MOD_RES (5)..(5): phosphorylated serine
VLIGSPKKVFFRKNLLRLTG

SEQ ID NO: 5699 - protein, 20 aa, Artificial Sequence
  Description of Artificial Sequence: Synthetic peptide
  MOD_RES (5)..(5): phosphorylated serine
VLIGSPKKYFFRKNLLRLTG

SEQ ID NO: 5700 - protein, 21 aa, Artificial Sequence
  Description of Artificial Sequence: Synthetic peptide
  MOD_RES (5)..(5): phosphorylated serine
VLKGSRSSELFFRKNLLRLTG

SEQ ID NO: 5701 - protein, 21 aa, Artificial Sequence
  Description of Artificial Sequence: Synthetic peptide
  MOD_RES (5)..(5): phosphorylated serine
VLKGSRSSEVFFRKNLLRLTG

SEQ ID NO: 5702 - protein, 23 aa, Artificial Sequence
  Description of Artificial Sequence: Synthetic peptide
  MOD_RES (7)..(7): phosphorylated serine
  MOD_RES (8)..(8): phosphorylated serine
VLKSRKSSVTEEFFRKNLLRLTG

SEQ ID NO: 5703 - protein, 21 aa, Artificial Sequence
  Description of Artificial Sequence: Synthetic peptide
  MOD_RES (8)..(8): phosphorylated serine
VLKVMIGSPKFFRKNLLRLTG

SEQ ID NO: 5704 - protein, 22 aa, Artificial Sequence
  Description of Artificial Sequence: Synthetic peptide
  MOD_RES (8)..(8): phosphorylated serine
VLKVMIGSPKKFFRKNLLRLTG

SEQ ID NO: 5705 - protein, 23 aa, Artificial Sequence
  Description of Artificial Sequence: Synthetic peptide
  MOD_RES (8)..(8): phosphorylated serine
VLKVMIGSPKKKFFRKNLLRLTG

SEQ ID NO: 5706 - protein, 20 aa, Artificial Sequence
  Description of Artificial Sequence: Synthetic peptide
  MOD_RES (4)..(4): phosphorylated serine
VLLSPVPELFFRKNLLRLTG

SEQ ID NO: 5707 - protein, 20 aa, Artificial Sequence
  Description of Artificial Sequence: Synthetic peptide
  MOD_RES (4)..(4): phosphorylated serine
VLLSPVPEVFFRKNLLRLTG

SEQ ID NO: 5708 - protein, 21 aa, Artificial Sequence
  Description of Artificial Sequence: Synthetic peptide
  MISC_FEATURE (5)..(7): at least one serine residue in the amino acid sequence SPS is phosphorylated
VLMKSPSPALFFRKNLLRLTG

SEQ ID NO: 5709 - protein, 21 aa, Artificial Sequence
  Description of Artificial Sequence: Synthetic peptide
  MISC_FEATURE (5)..(7): at least one serine residue in the amino acid sequence SPS is phosphorylated
VLMKSPSPAVFFRKNLLRLTG

SEQ ID NO: 5710 - protein, 20 aa, Artificial Sequence
  Description of Artificial Sequence: Synthetic peptide
  MOD_RES (4)..(4): phosphorylated threonine
VLQTPPYVKFFRKNLLRLTG

SEQ ID NO: 5711 - protein, 21 aa, Artificial Sequence
  Description of Artificial Sequence: Synthetic peptide
  MOD_RES (4)..(4): phosphorylated threonine
VLQTPPYVKKFFRKNLLRLTG

SEQ ID NO: 5712 - protein, 21 aa, Artificial Sequence
  Description of Artificial Sequence: Synthetic peptide
  MOD_RES (4)..(4): phosphorylated threonine
VLQTPPYVKYFFRKNLLRLTG

SEQ ID NO: 5713 - protein, 20 aa, Artificial Sequence
  Description of Artificial Sequence: Synthetic peptide
  MOD_RES (8)..(8): phosphorylated serine
VLSDVIPSIFFRKNLLRLTG

SEQ ID NO: 5714 - protein, 21 aa, Artificial Sequence
  Description of Artificial Sequence: Synthetic peptide
  MOD_RES (6)..(6): phosphorylated threonine
VLSSLTPAKVFFRKNLLRLTG

SEQ ID NO: 5715 - protein, 20 aa, Artificial Sequence
  Description of Artificial Sequence: Synthetic peptide
  MOD_RES (8)..(8): phosphorylated serine
VLVVDTPSIFFRKNLLRLTG

SEQ ID NO: 5716 - protein, 20 aa, Artificial Sequence
  Description of Artificial Sequence: Synthetic peptide
  MOD_RES (4)..(4): phosphorylated serine
VLYSPQMALFFRKNLLRLTG

SEQ ID NO: 5717 - protein, 21 aa, Artificial Sequence
  Description of Artificial Sequence: Synthetic peptide
  MOD_RES (5)..(5): phosphorylated threonine
VMFRTPLASVFFRKNLLRLTG

SEQ ID NO: 5718 - protein, 19 aa, Artificial Sequence
  Description of Artificial Sequence: Synthetic peptide
  MOD_RES (5)..(5): phosphorylated serine
VMIGSKKVFFRKNLLRLTG

SEQ ID NO: 5719 - protein, 20 aa, Artificial Sequence
  Description of Artificial Sequence: Synthetic peptide
  MOD_RES (5)..(5): phosphorylated serine
VMIGSPKKVFFRKNLLRLTG

SEQ ID NO: 5720 - protein, 20 aa, Artificial Sequence
  Description of Artificial Sequence: Synthetic peptide
  MOD_RES (5)..(5): phosphorylated serine
VMIGSPKKYFFRKNLLRLTG

SEQ ID NO: 5721 - protein, 21 aa, Artificial Sequence
  Description of Artificial Sequence: Synthetic peptide
  MOD_RES (8)..(8): phosphorylated serine
VMKVMIGSPKFFRKNLLRLTG

SEQ ID NO: 5722 - protein, 22 aa, Artificial Sequence
  Description of Artificial Sequence: Synthetic peptide
  MOD_RES (8)..(8): phosphorylated serine
VMKVMIGSPKKFFRKNLLRLTG

SEQ ID NO: 5723 - protein, 23 aa, Artificial Sequence
  Description of Artificial Sequence: Synthetic peptide
  MOD_RES (8)..(8): phosphorylated serine
VMKVMIGSPKKKFFRKNLLRLTG

SEQ ID NO: 5724 - protein, 23 aa, Artificial Sequence
  Description of Artificial Sequence: Synthetic peptide
  MOD_RES (8)..(8): phosphorylated serine
VMKVMIGSPKKYFFRKNLLRLTG

SEQ ID NO: 5725 - protein, 20 aa, Artificial Sequence
  Description of Artificial Sequence: Synthetic peptide
  MOD_RES (4)..(4): phosphorylated serine
VMLSPVPELFFRKNLLRLTG

SEQ ID NO: 5726 - protein, 20 aa, Artificial Sequence
  Description of Artificial Sequence: Synthetic peptide
  MOD_RES (4)..(4): phosphorylated serine
VMLSPVPEVFFRKNLLRLTG

SEQ ID NO: 5727 - protein, 20 aa, Artificial Sequence
  Description of Artificial Sequence: Synthetic peptide
  MOD_RES (4)..(4): phosphorylated threonine
VMQTPPYVKFFRKNLLRLTG

SEQ ID NO: 5728 - protein, 21 aa, Artificial Sequence
  Description of Artificial Sequence: Synthetic peptide
  MOD_RES (4)..(4): phosphorylated threonine
VMQTPPYVKKFFRKNLLRLTG

SEQ ID NO: 5729 - protein, 24 aa, Artificial Sequence
  Description of Artificial Sequence: Synthetic peptide
  MOD_RES (10)..(10): phosphorylated serine
VPHHGFEDWSQIRFFRKNLLRLTG

SEQ ID NO: 5730 - protein, 21 aa, Artificial Sequence
  Description of Artificial Sequence: Synthetic peptide
  MOD_RES (9)..(9): phosphorylated serine
VPKSGRSSSLFFRKNLLRLTG

SEQ ID NO: 5731 - protein, 20 aa, Artificial Sequence
  Description of Artificial Sequence: Synthetic peptide
  MOD_RES (4)..(4): phosphorylated serine
VPKSPAFALFFRKNLLRLTG

SEQ ID NO: 5732 - protein, 20 aa, Artificial Sequence
  Description of Artificial Sequence: Synthetic peptide
  MOD_RES (8)..(8): phosphorylated serine
VPLIRKKSLFFRKNLLRLTG

SEQ ID NO: 5733 - protein, 31 aa, Artificial Sequence
  Description of Artificial Sequence: Synthetic polypeptide
  MOD_RES (12)..(12): phosphorylated serine
VPNAPPAYEKLSAEQSPPPYFFRKNLLRLTG

SEQ ID NO: 5734 - protein, 21 aa, Artificial Sequence
  Description of Artificial Sequence: Synthetic peptide
  MOD_RES (9)..(9): phosphorylated serine
VPREVLRLSFFFRKNLLRLTG

SEQ ID NO: 5735 - protein, 21 aa, Artificial Sequence
  Description of Artificial Sequence: Synthetic peptide
  MOD_RES (9)..(9): phosphorylated serine
VPREVLRLSLFFRKNLLRLTG

SEQ ID NO: 5736 - protein, 21 aa, Artificial Sequence
  Description of Artificial Sequence: Synthetic peptide
  MOD_RES (9)..(9): phosphorylated serine
VPREVLRLSMFFRKNLLRLTG

SEQ ID NO: 5737 - protein, 21 aa, Artificial Sequence
  Description of Artificial Sequence: Synthetic peptide
  MOD_RES (9)..(9): phosphorylated serine
VPREVLRLSVFFRKNLLRLTG

SEQ ID NO: 5738 - protein, 21 aa, Artificial Sequence
  Description of Artificial Sequence: Synthetic peptide
  MOD_RES (8)..(8): phosphorylated serine
VPRPERRSSLFFRKNLLRLTG

SEQ ID NO: 5739 - protein, 24 aa, Artificial Sequence
  Description of Artificial Sequence: Synthetic peptide
  MOD_RES (4)..(4): phosphorylated serine
VPRSPKHAHSSSFFFRKNLLRLTG

SEQ ID NO: 5740 - protein, 24 aa, Artificial Sequence
  Description of Artificial Sequence: Synthetic peptide
  MOD_RES (4)..(4): phosphorylated serine
VPRSPKHAHSSSLFFRKNLLRLTG

SEQ ID NO: 5741 - protein, 24 aa, Artificial Sequence
  Description of Artificial Sequence: Synthetic peptide
  MOD_RES (4)..(4): phosphorylated serine
VPRSPKHAHSSSMFFRKNLLRLTG

SEQ ID NO: 5742 - protein, 24 aa, Artificial Sequence
  Description of Artificial Sequence: Synthetic peptide
  MOD_RES (4)..(4): phosphorylated serine
VPRSPKHAHSSSVFFRKNLLRLTG

SEQ ID NO: 5743 - protein, 20 aa, Artificial Sequence
  Description of Artificial Sequence: Synthetic peptide
  MOD_RES (4)..(4): phosphorylated threonine
VPSTPKSSLFFRKNLLRLTG

SEQ ID NO: 5744 - protein, 20 aa, Artificial Sequence
  Description of Artificial Sequence: Synthetic peptide
  MOD_RES (4)..(4): phosphorylated serine
VPTSPKSSLFFRKNLLRLTG

SEQ ID NO: 5745 - protein, 20 aa, Artificial Sequence
  Description of Artificial Sequence: Synthetic peptide
  MOD_RES (4)..(4): phosphorylated serine
VPVSPGQQLFFRKNLLRLTG

SEQ ID NO: 5746 - protein, 20 aa, Artificial Sequence
  Description of Artificial Sequence: Synthetic peptide
  MOD_RES (4)..(4): phosphorylated serine
VRASKDLAQFFRKNLLRLTG

SEQ ID NO: 5747 - protein, 28 aa, Artificial Sequence
  Description of Artificial Sequence: Synthetic peptide
  MOD_RES (4)..(4): phosphorylated serine
VRQSVTSFPDADAFHHQFFRKNLLRLTG

SEQ ID NO: 5748 - protein, 23 aa, Artificial Sequence
  Description of Artificial Sequence: Synthetic peptide
  MOD_RES (8)..(8): phosphorylated serine
VSKVMIGSPKKVFFRKNLLRLTG

SEQ ID NO: 5749 - protein, 23 aa, Artificial Sequence
  Description of Artificial Sequence: Synthetic peptide
  MOD_RES (8)..(8): phosphorylated serine
VSKVMIGSPKKYFFRKNLLRLTG

SEQ ID NO: 5750 - protein, 21 aa, Artificial Sequence
  Description of Artificial Sequence: Synthetic peptide
  MOD_RES (4)..(4): phosphorylated threonine
VTQTPPYVKKFFRKNLLRLTG

SEQ ID NO: 5751 - protein, 21 aa, Artificial Sequence
  Description of Artificial Sequence: Synthetic peptide
  MOD_RES (4)..(4): phosphorylated threonine
VTQTPPYVKYFFRKNLLRLTG

SEQ ID NO: 5752 - protein, 21 aa, Artificial Sequence
  Description of Artificial Sequence: Synthetic peptide
  MOD_RES (4)..(4): phosphorylated serine
VVDSPGQEVLFFRKNLLRLTG

SEQ ID NO: 5753 - protein, 20 aa, Artificial Sequence
  Description of Artificial Sequence: Synthetic peptide
  MOD_RES (4)..(4): phosphorylated tyrosine
VYTYIQSRFFFRKNLLRLTG

SEQ ID NO: 5754 - protein, 23 aa, Artificial Sequence
  Description of Artificial Sequence: Synthetic peptide
  MOD_RES (5)..(5): phosphorylated serine
WTHLSSKEVDPSFFRKNLLRLTG

SEQ ID NO: 5755 - protein, 25 aa, Artificial Sequence
  Description of Artificial Sequence: Synthetic peptide
  MOD_RES (5)..(5): phosphorylated serine
WTHLSSKEVDPSTGFFRKNLLRLTG

SEQ ID NO: 5756 - protein, 20 aa, Artificial Sequence
  Description of Artificial Sequence: Synthetic peptide
  MOD_RES (4)..(4): phosphorylated serine
YARSVHEEFFFRKNLLRLTG

SEQ ID NO: 5757 - protein, 20 aa, Artificial Sequence
  Description of Artificial Sequence: Synthetic peptide
  MOD_RES (8)..(8): phosphorylated serine
YAVPRRGSLFFRKNLLRLTG

SEQ ID NO: 5758 - protein, 20 aa, Artificial Sequence
  Description of Artificial Sequence: Synthetic peptide
  MOD_RES (8)..(8): phosphorylated tyrosine
YAYDGKDYIFFRKNLLRLTG

SEQ ID NO: 5759 - protein, 19 aa, Artificial Sequence
  Description of Artificial Sequence: Synthetic peptide
  MOD_RES (4)..(4): phosphorylated serine
YEGSPIKVFFRKNLLRLTG

SEQ ID NO: 5760 - protein, 23 aa, Artificial Sequence
  Description of Artificial Sequence: Synthetic peptide
  MOD_RES (5)..(5): phosphorylated serine
YEKLSAEQSPPPFFRKNLLRLTG

SEQ ID NO: 5761 - protein, 19 aa, Artificial Sequence
  Description of Artificial Sequence: Synthetic peptide
  MOD_RES (3)..(3): phosphorylated serine
YFSPFRPYFFRKNLLRLTG

SEQ ID NO: 5762 - protein, 17 aa, Artificial Sequence
  Description of Artificial Sequence: Synthetic peptide
  MOD_RES (1)..(1): phosphorylated tyrosine
YIQSRFFFRKNLLRLTG

SEQ ID NO: 5763 - protein, 20 aa, Artificial Sequence
  Description of Artificial Sequence: Synthetic peptide
  MOD_RES (4)..(4): phosphorylated serine
YLASLEKKLFFRKNLLRLTG

SEQ ID NO: 5764 - protein, 20 aa, Artificial Sequence
  Description of Artificial Sequence: Synthetic peptide
  MOD_RES (4)..(4): phosphorylated serine
YLDSGIHSGFFRKNLLRLTG

SEQ ID NO: 5765 - protein, 21 aa, Artificial Sequence
  Description of Artificial Sequence: Synthetic peptide
  MOD_RES (4)..(4): phosphorylated serine
  MOD_RES (8)..(8): phosphorylated serine
YLDSGIHSGAFFRKNLLRLTG

SEQ ID NO: 5766 - protein, 21 aa, Artificial Sequence
  Description of Artificial Sequence: Synthetic peptide
  MOD_RES (4)..(4): phosphorylated serine
YLDSGIHSGAFFRKNLLRLTG

SEQ ID NO: 5767 - protein, 21 aa, Artificial Sequence
  Description of Artificial Sequence: Synthetic peptide
  MOD_RES (4)..(4): phosphorylated serine
  MOD_RES (8)..(8): phosphorylated serine
YLDSGIHSGVFFRKNLLRLTG

SEQ ID NO: 5768 - protein, 21 aa, Artificial Sequence
  Description of Artificial Sequence: Synthetic peptide
  MOD_RES (4)..(4): phosphorylated serine
YLDSGIHSGVFFRKNLLRLTG

SEQ ID NO: 5769 - protein, 19 aa, Artificial Sequence
  Description of Artificial Sequence: Synthetic peptide
  MOD_RES (1)..(1): phosphorylated tyrosine
YLGLDVPVFFRKNLLRLTG

SEQ ID NO: 5770 - protein, 22 aa, Artificial Sequence
  Description of Artificial Sequence: Synthetic peptide
  MOD_RES (4)..(4): phosphorylated serine
YLGSISTLVTLFFRKNLLRLTG

SEQ ID NO: 5771 - protein, 20 aa, Artificial Sequence
  Description of Artificial Sequence: Synthetic peptide
  MOD_RES (5)..(5): phosphorylated serine
YLIHSPMSLFFRKNLLRLTG

SEQ ID NO: 5772 - protein, 20 aa, Artificial Sequence
  Description of Artificial Sequence: Synthetic peptide
  MOD_RES (4)..(4): phosphorylated serine
YLLSPLNTLFFRKNLLRLTG

SEQ ID NO: 5773 - protein, 22 aa, Artificial Sequence
  Description of Artificial Sequence: Synthetic peptide
  MOD_RES (4)..(4): phosphorylated serine
YLLSPTKLPSIFFRKNLLRLTG

SEQ ID NO: 5774 - protein, 22 aa, Artificial Sequence
  Description of Artificial Sequence: Synthetic peptide
  MOD_RES (4)..(4): phosphorylated serine
YLLSPTKLPSVFFRKNLLRLTG

SEQ ID NO: 5775 - protein, 20 aa, Artificial Sequence
  Description of Artificial Sequence: Synthetic peptide
  MOD_RES (1)..(1): phosphorylated tyrosine
YLQSRYYRAFFRKNLLRLTG

SEQ ID NO: 5776 - protein, 20 aa, Artificial Sequence
  Description of Artificial Sequence: Synthetic peptide
  MOD_RES (4)..(4): phosphorylated serine
YLQSRYYRAFFRKNLLRLTG

SEQ ID NO: 5777 - protein, 22 aa, Artificial Sequence
  Description of Artificial Sequence: Synthetic peptide
  MOD_RES (5)..(5): phosphorylated serine
YLSDSDTEAKLFFRKNLLRLTG

SEQ ID NO: 5778 - protein, 21 aa, Artificial Sequence
  Description of Artificial Sequence: Synthetic peptide
  MOD_RES (4)..(4): phosphorylated serine
  MOD_RES (8)..(8): phosphorylated serine
YMDSGIHSGAFFRKNLLRLTG

SEQ ID NO: 5779 - protein, 21 aa, Artificial Sequence
  Description of Artificial Sequence: Synthetic peptide
  MOD_RES (4)..(4): phosphorylated serine
YMDSGIHSGAFFRKNLLRLTG

SEQ ID NO: 5780 - protein, 21 aa, Artificial Sequence
  Description of Artificial Sequence: Synthetic peptide
  MOD_RES (4)..(4): phosphorylated serine
  MOD_RES (8)..(8): phosphorylated serine
YMDSGIHSGVFFRKNLLRLTG

SEQ ID NO: 5781 - protein, 21 aa, Artificial Sequence
  Description of Artificial Sequence: Synthetic peptide
  MOD_RES (4)..(4): phosphorylated serine
YMDSGIHSGVFFRKNLLRLTG

SEQ ID NO: 5782 - protein, 21 aa, Artificial Sequence
  Description of Artificial Sequence: Synthetic peptide
  MOD_RES (6)..(6): phosphorylated serine
YPDPHSPFAVFFRKNLLRLTG

SEQ ID NO: 5783 - protein, 20 aa, Artificial Sequence
  Description of Artificial Sequence: Synthetic peptide
  MOD_RES (7)..(7): phosphorylated serine
YPGGRRSSLFFRKNLLRLTG

SEQ ID NO: 5784 - protein, 22 aa, Artificial Sequence
  Description of Artificial Sequence: Synthetic peptide
  MOD_RES (4)..(4): phosphorylated serine
YPLSPAKVNQYFFRKNLLRLTG

SEQ ID NO: 5785 - protein, 22 aa, Artificial Sequence
  Description of Artificial Sequence: Synthetic peptide
  MOD_RES (4)..(4): phosphorylated serine
YPLSPTKISEYFFRKNLLRLTG

SEQ ID NO: 5786 - protein, 22 aa, Artificial Sequence
  Description of Artificial Sequence: Synthetic peptide
  MOD_RES (4)..(4): phosphorylated serine
YPLSPTKISQYFFRKNLLRLTG

SEQ ID NO: 5787 - protein, 23 aa, Artificial Sequence
  Description of Artificial Sequence: Synthetic peptide
  MOD_RES (4)..(4): phosphorylated serine
YPRSEDEVEGVMFFRKNLLRLTG

SEQ ID NO: 5788 - protein, 22 aa, Artificial Sequence
  Description of Artificial Sequence: Synthetic peptide
  MOD_RES (4)..(4): phosphorylated serine
YPRSFDEVEGFFFRKNLLRLTG

SEQ ID NO: 5789 - protein, 22 aa, Artificial Sequence
  Description of Artificial Sequence: Synthetic peptide
  MOD_RES (4)..(4): phosphorylated serine
YPRSFDEVEGLFFRKNLLRLTG

SEQ ID NO: 5790 - protein, 22 aa, Artificial Sequence
  Description of Artificial Sequence: Synthetic peptide
  MOD_RES (4)..(4): phosphorylated serine
YPRSFDEVEGMFFRKNLLRLTG

SEQ ID NO: 5791 - protein, 22 aa, Artificial Sequence
  Description of Artificial Sequence: Synthetic peptide
  MOD_RES (4)..(4): phosphorylated serine
YPRSFDEVEGVFFRKNLLRLTG

SEQ ID NO: 5792 - protein, 23 aa, Artificial Sequence
  Description of Artificial Sequence: Synthetic peptide
  MOD_RES (4)..(4): phosphorylated serine
YPRSFDEVEGVFFFRKNLLRLTG

SEQ ID NO: 5793 - protein, 23 aa, Artificial Sequence
  Description of Artificial Sequence: Synthetic peptide
  MOD_RES (4)..(4): phosphorylated serine
YPRSFDEVEGVLFFRKNLLRLTG

SEQ ID NO: 5794 - protein, 23 aa, Artificial Sequence
  Description of Artificial Sequence: Synthetic peptide
  MOD_RES (4)..(4): phosphorylated serine
YPRSFDEVEGVMFFRKNLLRLTG

SEQ ID NO: 5795 - protein, 23 aa, Artificial Sequence
  Description of Artificial Sequence: Synthetic peptide
  MOD_RES (4)..(4): phosphorylated serine
YPRSFDEVEGVVFFRKNLLRLTG

SEQ ID NO: 5796 - protein, 20 aa, Artificial Sequence
  Description of Artificial Sequence: Synthetic peptide
  MOD_RES (7)..(7): phosphorylated serine
YPSFRRSSLFFRKNLLRLTG

SEQ ID NO: 5797 - protein, 20 aa, Artificial Sequence
  Description of Artificial Sequence: Synthetic peptide
  MOD_RES (4)..(4): phosphorylated serine
YPSSPRKALFFRKNLLRLTG

SEQ ID NO: 5798 - protein, 19 aa, Artificial Sequence
  Description of Artificial Sequence: Synthetic peptide
  MOD_RES (4)..(4): phosphorylated serine
YPSSPRKFFFRKNLLRLTG

SEQ ID NO: 5799 - protein, 19 aa, Artificial Sequence
  Description of Artificial Sequence: Synthetic peptide
  MOD_RES (4)..(4): phosphorylated serine
YPSSPRKLFFRKNLLRLTG

SEQ ID NO: 5800 - protein, 19 aa, Artificial Sequence
  Description of Artificial Sequence: Synthetic peptide
  MOD_RES (4)..(4): phosphorylated serine
YPSSPRKMFFRKNLLRLTG

SEQ ID NO: 5801 - protein, 19 aa, Artificial Sequence
  Description of Artificial Sequence: Synthetic peptide
  MOD_RES (4)..(4): phosphorylated serine
YPSSPRKVFFRKNLLRLTG

SEQ ID NO: 5802 - protein, 21 aa, Artificial Sequence
  Description of Artificial Sequence: Synthetic peptide
  MOD_RES (6)..(6): phosphorylated serine
YPYEFSPVKMFFRKNLLRLTG

SEQ ID NO: 5803 - protein, 22 aa, Artificial Sequence
  Description of Artificial Sequence: Synthetic peptide
  MOD_RES (4)..(4): phosphorylated serine
YQLSPTKLPSIFFRKNLLRLTG

SEQ ID NO: 5804 - protein, 22 aa, Artificial Sequence
  Description of Artificial Sequence: Synthetic peptide
  MOD_RES (4)..(4): phosphorylated serine
YQLSPTKLPSVFFRKNLLRLTG

SEQ ID NO: 5805 - protein, 21 aa, Artificial Sequence
  Description of Artificial Sequence: Synthetic peptide
  MOD_RES (6)..(6): phosphorylated serine
YQRPFSPSAYFFRKNLLRLTG

SEQ ID NO: 5806 - protein, 22 aa, Artificial Sequence
  Description of Artificial Sequence: Synthetic peptide
  MOD_RES (4)..(4): phosphorylated serine
YQRSFDEVEGFFFRKNLLRLTG

SEQ ID NO: 5807 - protein, 22 aa, Artificial Sequence
  Description of Artificial Sequence: Synthetic peptide
  MOD_RES (4)..(4): phosphorylated serine
YQRSFDEVEGLFFRKNLLRLTG

SEQ ID NO: 5808 - protein, 22 aa, Artificial Sequence
  Description of Artificial Sequence: Synthetic peptide
  MOD_RES (4)..(4): phosphorylated serine
YQRSFDEVEGMFFRKNLLRLTG

SEQ ID NO: 5809 - protein, 22 aa, Artificial Sequence
  Description of Artificial Sequence: Synthetic peptide
  MOD_RES (4)..(4): phosphorylated serine
YQRSFDEVEGVFFRKNLLRLTG

SEQ ID NO: 5810 - protein, 23 aa, Artificial Sequence
  Description of Artificial Sequence: Synthetic peptide
  MOD_RES (4)..(4): phosphorylated serine
YQRSFDEVEGVFFFRKNLLRLTG

SEQ ID NO: 5811 - protein, 23 aa, Artificial Sequence
  Description of Artificial Sequence: Synthetic peptide
  MOD_RES (4)..(4): phosphorylated serine
YQRSFDEVEGVLFFRKNLLRLTG

SEQ ID NO: 5812 - protein, 23 aa, Artificial Sequence
  Description of Artificial Sequence: Synthetic peptide
  MOD_RES (4)..(4): phosphorylated serine
YQRSFDEVEGVMFFRKNLLRLTG

SEQ ID NO: 5813 - protein, 23 aa, Artificial Sequence
  Description of Artificial Sequence: Synthetic peptide
  MOD_RES (4)..(4): phosphorylated serine
YQRSFDEVEGVVFFRKNLLRLTG

SEQ ID NO: 5814 - protein, 20 aa, Artificial Sequence
  Description of Artificial Sequence: Synthetic peptide
  MOD_RES (4)..(4): phosphorylated serine
YRYSPQSFLFFRKNLLRLTG

SEQ ID NO: 5815 - protein, 20 aa, Artificial Sequence
  Description of Artificial Sequence: Synthetic peptide
  MOD_RES (5)..(5): phosphorylated threonine
YTAGTPYKVFFRKNLLRLTG

SEQ ID NO: 5816 - protein, 28 aa, Artificial Sequence
  Description of Artificial Sequence: Synthetic peptide
  MOD_RES (8)..(8): phosphorylated serine
YYTAGSSSPTHAKSAHVFFRKNLLRLTG

SEQ ID NO: 5817 - protein, 33 aa, Artificial Sequence
  Description of Artificial Sequence: Synthetic polypeptide
  MOD_RES (1)..(1): N-terminally acetylated serine
  MOD_RES (16)..(16): phosphorylated serine
SAARESHPHGVKRSASPDDDLGFFRKNWLRLTW

SEQ ID NO: 5818 - protein, 19 aa, Artificial Sequence
  Description of Artificial Sequence: Synthetic peptide
  MOD_RES (4)..(4): phosphorylated serine
AAESPSFLFFRKNWLRLTW

SEQ ID NO: 5819 - protein, 24 aa, Artificial Sequence
  Description of Artificial Sequence: Synthetic peptide
  MOD_RES (7)..(7): phosphorylated serine
AASNFKSPVKTIRFFRKNWLRLTW

SEQ ID NO: 5820 - protein, 20 aa, Artificial Sequence
  Description of Artificial Sequence: Synthetic peptide
  MOD_RES (4)..(4): phosphorylated serine
ADLSPEREVFFRKNWLRLTW

SEQ ID NO: 5821 - protein, 22 aa, Artificial Sequence
  Description of Artificial Sequence: Synthetic peptide
  MOD_RES (7)..(7): phosphorylated threonine
AEDEIGTPRKFFFRKNWLRLTW

SEQ ID NO: 5822 - protein, 22 aa, Artificial Sequence
  Description of Artificial Sequence: Synthetic peptide
  MOD_RES (7)..(7): phosphorylated threonine
AEDEIGTPRKYFFRKNWLRLTW

SEQ ID NO: 5823 - protein, 22 aa, Artificial Sequence
  Description of Artificial Sequence: Synthetic peptide
  MOD_RES (7)..(7): phosphorylated threonine
AEEEIGTPRKFFFRKNWLRLTW

SEQ ID NO: 5824 - protein, 22 aa, Artificial Sequence
  Description of Artificial Sequence: Synthetic peptide
  MOD_RES (7)..(7): phosphorylated threonine
AEEEIGTPRKWFFRKNWLRLTW

SEQ ID NO: 5825 - protein, 22 aa, Artificial Sequence
  Description of Artificial Sequence: Synthetic peptide
  MOD_RES (7)..(7): phosphorylated threonine
AEEEIGTPRKYFFRKNWLRLTW

SEQ ID NO: 5826 - protein, 20 aa, Artificial Sequence
  Description of Artificial Sequence: Synthetic peptide
  MOD_RES (8)..(8): phosphorylated serine
AENARSASFFFRKNWLRLTW

SEQ ID NO: 5827 - protein, 21 aa, Artificial Sequence
  Description of Artificial Sequence: Synthetic peptide
  MOD_RES (4)..(4): phosphorylated serine
AENSPTRQQFFFRKNWLRLTW

SEQ ID NO: 5828 - protein, 21 aa, Artificial Sequence
  Description of Artificial Sequence: Synthetic peptide
  MOD_RES (4)..(4): phosphorylated serine
AENSPTRQQWFFRKNWLRLTW

SEQ ID NO: 5829 - protein, 21 aa, Artificial Sequence
  Description of Artificial Sequence: Synthetic peptide
  MOD_RES (4)..(4): phosphorylated serine
AENSPTRQQYFFRKNWLRLTW

SEQ ID NO: 5830 - protein, 20 aa, Artificial Sequence
  Description of Artificial Sequence: Synthetic peptide
  MOD_RES (4)..(4): phosphorylated serine
AENSSSRELFFRKNWLRLTW

SEQ ID NO: 5831 - protein, 21 aa, Artificial Sequence
  Description of Artificial Sequence: Synthetic peptide
  MOD_RES (5)..(5): phosphorylated serine
AEQGSPRVSYFFRKNWLRLTW

SEQ ID NO: 5832 - protein, 22 aa, Artificial Sequence
  Description of Artificial Sequence: Synthetic peptide
  MOD_RES (4)..(4): phosphorylated serine
AESSPTAGKKFFFRKNWLRLTW

SEQ ID NO: 5833 - protein, 22 aa, Artificial Sequence
  Description of Artificial Sequence: Synthetic peptide
  MOD_RES (4)..(4): phosphorylated serine
AESSPTAGKKLFFRKNWLRLTW

SEQ ID NO: 5834 - protein, 22 aa, Artificial Sequence
  Description of Artificial Sequence: Synthetic peptide
  MOD_RES (4)..(4): phosphorylated serine
AESSPTAGKKWFFRKNWLRLTW

SEQ ID NO: 5835 - protein, 22 aa, Artificial Sequence
  Description of Artificial Sequence: Synthetic peptide
  MOD_RES (4)..(4): phosphorylated serine
AESSPTAGKKYFFRKNWLRLTW

SEQ ID NO: 5836 - protein, 20 aa, Artificial Sequence
  Description of Artificial Sequence: Synthetic peptide
  MOD_RES (4)..(4): phosphorylated serine
AGDSPGSQFFFRKNWLRLTW

SEQ ID NO: 5837 - protein, 20 aa, Artificial Sequence
  Description of Artificial Sequence: Synthetic peptide
  MOD_RES (4)..(4): phosphorylated serine
AILSPAFKVFFRKNWLRLTW

SEQ ID NO: 5838 - protein, 20 aa, Artificial Sequence
  Description of Artificial Sequence: Synthetic peptide
  MOD_RES (5)..(5): phosphorylated serine
AIMRSPQMVFFRKNWLRLTW

SEQ ID NO: 5839 - protein, 19 aa, Artificial Sequence
  Description of Artificial Sequence: Synthetic peptide
  MOD_RES (3)..(3): phosphorylated serine
AISDLQQLFFRKNWLRLTW

SEQ ID NO: 5840 - protein, 19 aa, Artificial Sequence
  Description of Artificial Sequence: Synthetic peptide
  MOD_RES (4)..(4): phosphorylated serine
AKLSETISFFRKNWLRLTW

SEQ ID NO: 5841 - protein, 20 aa, Artificial Sequence
  Description of Artificial Sequence: Synthetic peptide
  MOD_RES (5)..(5): phosphorylated serine
ALAASPHAVFFRKNWLRLTW

SEQ ID NO: 5842 - protein, 22 aa, Artificial Sequence
  Description of Artificial Sequence: Synthetic peptide
  MOD_RES (4)..(4): phosphorylated serine
ALDSGASLLHLFFRKNWLRLTW

SEQ ID NO: 5843 - protein, 22 aa, Artificial Sequence
  Description of Artificial Sequence: Synthetic peptide
  MOD_RES (4)..(4): phosphorylated serine
ALDSGASLLHVFFRKNWLRLTW

SEQ ID NO: 5844 - protein, 20 aa, Artificial Sequence
  Description of Artificial Sequence: Synthetic peptide
  MOD_RES (5)..(5): phosphorylated threonine
ALGNTPPFLFFRKNWLRLTW

SEQ ID NO: 5845 - protein, 22 aa, Artificial Sequence
  Description of Artificial Sequence: Synthetic peptide
  MOD_RES (4)..(4): phosphorylated serine
ALGSRESLATIFFRKNWLRLTW

SEQ ID NO: 5846 - protein, 22 aa, Artificial Sequence
  Description of Artificial Sequence: Synthetic peptide
  MOD_RES (4)..(4): phosphorylated serine
ALGSRESLATVFFRKNWLRLTW

SEQ ID NO: 5847 - protein, 20 aa, Artificial Sequence
  Description of Artificial Sequence: Synthetic peptide
  MOD_RES (6)..(6): phosphorylated serine
ALIHQSLGLFFRKNWLRLTW

SEQ ID NO: 5848 - protein, 20 aa, Artificial Sequence
  Description of Artificial Sequence: Synthetic peptide
  MOD_RES (6)..(6): phosphorylated serine
ALIHQSLGVFFRKNWLRLTW

SEQ ID NO: 5849 - protein, 24 aa, Artificial Sequence
  Description of Artificial Sequence: Synthetic peptide
  MOD_RES (7)..(7): phosphorylated serine
ALLGSKSPDPYRLFFRKNWLRLTW

SEQ ID NO: 5850 - protein, 24 aa, Artificial Sequence
  Description of Artificial Sequence: Synthetic peptide
  MOD_RES (7)..(7): phosphorylated serine
ALLGSKSPDPYRVFFRKNWLRLTW

SEQ ID NO: 5851 - protein, 20 aa, Artificial Sequence
  Description of Artificial Sequence: Synthetic peptide
  MOD_RES (4)..(4): phosphorylated serine
ALLSLLKRVFFRKNWLRLTW

SEQ ID NO: 5852 - protein, 20 aa, Artificial Sequence
  Description of Artificial Sequence: Synthetic peptide
  MOD_RES (5)..(5): phosphorylated serine
ALMGSPQLVFFRKNWLRLTW

SEQ ID NO: 5853 - protein, 22 aa, Artificial Sequence
  Description of Artificial Sequence: Synthetic peptide
  MOD_RES (5)..(5): phosphorylated serine
ALMGSPQLVAAFFRKNWLRLTW

SEQ ID NO: 5854 - protein, 21 aa, Artificial Sequence
  Description of Artificial Sequence: Synthetic peptide
  MOD_RES (5)..(5): phosphorylated serine
ALRSSPIMRKFFRKNWLRLTW

SEQ ID NO: 5855 - protein, 21 aa, Artificial Sequence
  Description of Artificial Sequence: Synthetic peptide
  MOD_RES (5)..(5): phosphorylated serine
ALRSSPIMRYFFRKNWLRLTW

SEQ ID NO: 5856 - protein, 22 aa, Artificial Sequence
  Description of Artificial Sequence: Synthetic peptide
  MOD_RES (4)..(4): phosphorylated serine
ALVSPPALHNAFFRKNWLRLTW

SEQ ID NO: 5857 - protein, 22 aa, Artificial Sequence
  Description of Artificial Sequence: Synthetic peptide
  MOD_RES (4)..(4): phosphorylated serine
ALVSPPALHNVFFRKNWLRLTW

SEQ ID NO: 5858 - protein, 20 aa, Artificial Sequence
  Description of Artificial Sequence: Synthetic peptide
  MOD_RES (4)..(4): phosphorylated serine
ALYSGVHKKFFRKNWLRLTW

SEQ ID NO: 5859 - protein, 20 aa, Artificial Sequence
  Description of Artificial Sequence: Synthetic peptide
  MOD_RES (4)..(4): phosphorylated serine
ALYSGVHKYFFRKNWLRLTW

SEQ ID NO: 5860 - protein, 21 aa, Artificial Sequence
  Description of Artificial Sequence: Synthetic peptide
  MOD_RES (4)..(4): phosphorylated serine
ALYSPAQPSLFFRKNWLRLTW

SEQ ID NO: 5861 - protein, 21 aa, Artificial Sequence
  Description of Artificial Sequence: Synthetic peptide
  MOD_RES (4)..(4): phosphorylated serine
ALYSPAQPSVFFRKNWLRLTW

SEQ ID NO: 5862 - protein, 20 aa, Artificial Sequence
  Description of Artificial Sequence: Synthetic peptide
  MOD_RES (4)..(4): phosphorylated threonine
ALYTPQAPKFFRKNWLRLTW

SEQ ID NO: 5863 - protein, 20 aa, Artificial Sequence
  Description of Artificial Sequence: Synthetic peptide
  MOD_RES (4)..(4): phosphorylated threonine
ALYTPQAPYFFRKNWLRLTW

SEQ ID NO: 5864 - protein, 20 aa, Artificial Sequence
  Description of Artificial Sequence: Synthetic peptide
  MOD_RES (5)..(5): phosphorylated serine
AMAASPHAVFFRKNWLRLTW

SEQ ID NO: 5865 - protein, 22 aa, Artificial Sequence
  Description of Artificial Sequence: Synthetic peptide
  MOD_RES (4)..(4): phosphorylated serine
AMDSGASLLHLFFRKNWLRLTW

SEQ ID NO: 5866 - protein, 22 aa, Artificial Sequence
  Description of Artificial Sequence: Synthetic peptide
  MOD_RES (4)..(4): phosphorylated serine
AMDSGASLLHVFFRKNWLRLTW

SEQ ID NO: 5867 - protein, 22 aa, Artificial Sequence
  Description of Artificial Sequence: Synthetic peptide
  MOD_RES (4)..(4): phosphorylated serine
AMGSRESLATIFFRKNWLRLTW

SEQ ID NO: 5868 - protein, 22 aa, Artificial Sequence
  Description of Artificial Sequence: Synthetic peptide
  MOD_RES (4)..(4): phosphorylated serine
AMGSRESLATVFFRKNWLRLTW

SEQ ID NO: 5869 - protein, 24 aa, Artificial Sequence
  Description of Artificial Sequence: Synthetic peptide
  MOD_RES (7)..(7): phosphorylated serine
AMLGSKSPDPYRLFFRKNWLRLTW

SEQ ID NO: 5870 - protein, 24 aa, Artificial Sequence
  Description of Artificial Sequence: Synthetic peptide
  MOD_RES (7)..(7): phosphorylated serine
AMLGSKSPDPYRVFFRKNWLRLTW

SEQ ID NO: 5871 - protein, 20 aa, Artificial Sequence
  Description of Artificial Sequence: Synthetic peptide
  MOD_RES (5)..(5): phosphorylated serine
AMPGSPVEVFFRKNWLRLTW

SEQ ID NO: 5872 - protein, 21 aa, Artificial Sequence
  Description of Artificial Sequence: Synthetic peptide
  MOD_RES (5)..(5): phosphorylated serine
AMRSSPIMRKFFRKNWLRLTW

SEQ ID NO: 5873 - protein, 22 aa, Artificial Sequence
  Description of Artificial Sequence: Synthetic peptide
  MOD_RES (4)..(4): phosphorylated serine
AMVSPPALHNAFFRKNWLRLTW

SEQ ID NO: 5874 - protein, 22 aa, Artificial Sequence
  Description of Artificial Sequence: Synthetic peptide
  MOD_RES (4)..(4): phosphorylated serine
AMVSPPALHNVFFRKNWLRLTW

SEQ ID NO: 5875 - protein, 20 aa, Artificial Sequence
  Description of Artificial Sequence: Synthetic peptide
  MOD_RES (4)..(4): phosphorylated serine
AMYSGVHKKFFRKNWLRLTW

SEQ ID NO: 5876 - protein, 20 aa, Artificial Sequence
  Description of Artificial Sequence: Synthetic peptide
  MOD_RES (4)..(4): phosphorylated serine
APDSPRAFLFFRKNWLRLTW

SEQ ID NO: 5877 - protein, 20 aa, Artificial Sequence
  Description of Artificial Sequence: Synthetic peptide
  MOD_RES (8)..(8): phosphorylated serine
APLARASSLFFRKNWLRLTW

SEQ ID NO: 5878 - protein, 20 aa, Artificial Sequence
  Description of Artificial Sequence: Synthetic peptide
  MOD_RES (9)..(9): phosphorylated serine
APPAYEKLSFFRKNWLRLTW

SEQ ID NO: 5879 - protein, 23 aa, Artificial Sequence
  Description of Artificial Sequence: Synthetic peptide
  MOD_RES (9)..(9): phosphorylated serine
APPAYEKLSAEQFFRKNWLRLTW

SEQ ID NO: 5880 - protein, 26 aa, Artificial Sequence
  Description of Artificial Sequence: Synthetic peptide
  MOD_RES (9)..(9): phosphorylated serine
APPAYEKLSAEQSPPFFRKNWLRLTW

SEQ ID NO: 5881 - protein, 27 aa, Artificial Sequence
  Description of Artificial Sequence: Synthetic peptide
  MOD_RES (9)..(9): phosphorylated serine
APPAYEKLSAEQSPPPFFRKNWLRLTW

SEQ ID NO: 5882 - protein, 28 aa, Artificial Sequence
  Description of Artificial Sequence: Synthetic peptide
  MOD_RES (9)..(9): phosphorylated serine
APPAYEKLSAEQSPPPYFFRKNWLRLTW

SEQ ID NO: 5883 - protein, 36 aa, Artificial Sequence
  Description of Artificial Sequence: Synthetic polypeptide
  MOD_RES (13)..(13): phosphorylated serine
APPPLVPAPRPSSPPRGPGPARADRFFRKNWLRLTW

SEQ ID NO: 5884 - protein, 23 aa, Artificial Sequence
  Description of Artificial Sequence: Synthetic peptide
  MOD_RES (6)..(6): phosphorylated serine
APRAPSASPLALFFRKNWLRLTW

SEQ ID NO: 5885 - protein, 21 aa, Artificial Sequence
  Description of Artificial Sequence: Synthetic peptide
  MOD_RES (9)..(9): phosphorylated serine
APRDRRAVSFFFRKNWLRLTW

SEQ ID NO: 5886 - protein, 21 aa, Artificial Sequence
  Description of Artificial Sequence: Synthetic peptide
  MOD_RES (6)..(6): phosphorylated serine
APRKGSFSALFFRKNWLRLTW

SEQ ID NO: 5887 - protein, 22 aa, Artificial Sequence
  Description of Artificial Sequence: Synthetic peptide
  MOD_RES (6)..(6): phosphorylated serine
APRKGSFSALFFFRKNWLRLTW

SEQ ID NO: 5888 - protein, 22 aa, Artificial Sequence
  Description of Artificial Sequence: Synthetic peptide
  MOD_RES (6)..(6): phosphorylated serine
APRKGSFSALLFFRKNWLRLTW

SEQ ID NO: 5889 - protein, 22 aa, Artificial Sequence
  Description of Artificial Sequence: Synthetic peptide
  MOD_RES (6)..(6): phosphorylated serine
APRKGSFSALMFFRKNWLRLTW

SEQ ID NO: 5890 - protein, 22 aa, Artificial Sequence
  Description of Artificial Sequence: Synthetic peptide
  MOD_RES (6)..(6): phosphorylated serine
APRKGSFSALVFFRKNWLRLTW

SEQ ID NO: 5891 - protein, 21 aa, Artificial Sequence
  Description of Artificial Sequence: Synthetic peptide
  MOD_RES (6)..(6): phosphorylated serine
APRNGSGVALFFRKNWLRLTW

SEQ ID NO: 5892 - protein, 20 aa, Artificial Sequence
  Description of Artificial Sequence: Synthetic peptide
  MOD_RES (6)..(6): phosphorylated serine
APRRYSSSFFFRKNWLRLTW

SEQ ID NO: 5893 - protein, 20 aa, Artificial Sequence
  Description of Artificial Sequence: Synthetic peptide
  MOD_RES (6)..(6): phosphorylated serine
APRRYSSSLFFRKNWLRLTW

SEQ ID NO: 5894 - protein, 20 aa, Artificial Sequence
  Description of Artificial Sequence: Synthetic peptide
  MOD_RES (6)..(6): phosphorylated serine
APRRYSSSMFFRKNWLRLTW

SEQ ID NO: 5895 - protein, 20 aa, Artificial Sequence
  Description of Artificial Sequence: Synthetic peptide
  MOD_RES (6)..(6): phosphorylated serine
APRRYSSSVFFRKNWLRLTW

SEQ ID NO: 5896 - protein, 21 aa, Artificial Sequence
  Description of Artificial Sequence: Synthetic peptide
  MOD_RES (4)..(4): phosphorylated serine
APRSPPPSRFFFRKNWLRLTW

SEQ ID NO: 5897 - protein, 21 aa, Artificial Sequence
  Description of Artificial Sequence: Synthetic peptide
  MOD_RES (4)..(4): phosphorylated serine
APRSPPPSRLFFRKNWLRLTW

SEQ ID NO: 5898 - protein, 21 aa, Artificial Sequence
  Description of Artificial Sequence: Synthetic peptide
  MOD_RES (4)..(4): phosphorylated serine
APRSPPPSRMFFRKNWLRLTW

SEQ ID NO: 5899 - protein, 21 aa, Artificial Sequence
  Description of Artificial Sequence: Synthetic peptide
  MOD_RES (4)..(4): phosphorylated serine
APRSPPPSRPFFRKNWLRLTW

SEQ ID NO: 5900 - protein, 21 aa, Artificial Sequence
  Description of Artificial Sequence: Synthetic peptide
  MOD_RES (4)..(4): phosphorylated serine
APRSPPPSRVFFRKNWLRLTW

SEQ ID NO: 5901 - protein, 21 aa, Artificial Sequence
  Description of Artificial Sequence: Synthetic peptide
  MOD_RES (9)..(9): phosphorylated threonine
APSLFHLNTLFFRKNWLRLTW

SEQ ID NO: 5902 - protein, 22 aa, Artificial Sequence
  Description of Artificial Sequence: Synthetic peptide
  MOD_RES (8)..(8): phosphorylated serine
APSSARASPLLFFRKNWLRLTW

SEQ ID NO: 5903 - protein, 23 aa, Artificial Sequence
  Description of Artificial Sequence: Synthetic peptide
  MOD_RES (9)..(9): phosphorylated serine
APSTYAHLSPAKFFRKNWLRLTW

SEQ ID NO: 5904 - protein, 28 aa, Artificial Sequence
  Description of Artificial Sequence: Synthetic peptide
  MOD_RES (9)..(9): phosphorylated serine
APSTYAHLSPAKTPPPPFFRKNWLRLTW

SEQ ID NO: 5905 - protein, 20 aa, Artificial Sequence
  Description of Artificial Sequence: Synthetic peptide
  MOD_RES (6)..(6): phosphorylated serine
APSVRSLSLFFRKNWLRLTW

SEQ ID NO: 5906 - protein, 20 aa, Artificial Sequence
  Description of Artificial Sequence: Synthetic peptide
  MOD_RES (8)..(8): phosphorylated serine
APSVRSLSLFFRKNWLRLTW

SEQ ID NO: 5907 - protein, 22 aa, Artificial Sequence
  Description of Artificial Sequence: Synthetic peptide
  MOD_RES (4)..(4): phosphorylated serine
ARFSPDDKYSFFFRKNWLRLTW

SEQ ID NO: 5908 - protein, 22 aa, Artificial Sequence
  Description of Artificial Sequence: Synthetic peptide
  MOD_RES (4)..(4): phosphorylated serine
ARFSPDDKYSKFFRKNWLRLTW

SEQ ID NO: 5909 - protein, 22 aa, Artificial Sequence
  Description of Artificial Sequence: Synthetic peptide
  MOD_RES (4)..(4): phosphorylated serine
ARFSPDDKYSLFFRKNWLRLTW

SEQ ID NO: 5910 - protein, 22 aa, Artificial Sequence
  Description of Artificial Sequence: Synthetic peptide
  MOD_RES (4)..(4): phosphorylated serine
ARFSPDDKYSMFFRKNWLRLTW

SEQ ID NO: 5911 - protein, 22 aa, Artificial Sequence
  Description of Artificial Sequence: Synthetic peptide
  MOD_RES (4)..(4): phosphorylated serine
ARFSPDDKYSRFFRKNWLRLTW

SEQ ID NO: 5912 - protein, 22 aa, Artificial Sequence
  Description of Artificial Sequence: Synthetic peptide
  MOD_RES (4)..(4): phosphorylated serine
ARFSPDDKYSYFFRKNWLRLTW

SEQ ID NO: 5913 - protein, 22 aa, Artificial Sequence
  Description of Artificial Sequence: Synthetic peptide
  MOD_RES (7)..(7): phosphorylated threonine
ASDEIGTPRKFFFRKNWLRLTW

SEQ ID NO: 5914 - protein, 22 aa, Artificial Sequence
  Description of Artificial Sequence: Synthetic peptide
  MOD_RES (7)..(7): phosphorylated threonine
ASDEIGTPRKYFFRKNWLRLTW

SEQ ID NO: 5915 - protein, 22 aa, Artificial Sequence
  Description of Artificial Sequence: Synthetic peptide
  MOD_RES (7)..(7): phosphorylated threonine
ASEEIGTPRKFFFRKNWLRLTW

SEQ ID NO: 5916 - protein, 22 aa, Artificial Sequence
  Description of Artificial Sequence: Synthetic peptide
  MOD_RES (7)..(7): phosphorylated threonine
ASEEIGTPRKYFFRKNWLRLTW

SEQ ID NO: 5917 - protein, 26 aa, Artificial Sequence
  Description of Artificial Sequence: Synthetic peptide
  MOD_RES (2)..(2): phosphorylated serine
  MOD_RES (7)..(7): phosphorylated serine
ASISRLSGEQVDGKGFFRKNWLRLTW

SEQ ID NO: 5918 - protein, 26 aa, Artificial Sequence
  Description of Artificial Sequence: Synthetic peptide
  MOD_RES (2)..(2): phosphorylated serine
ASISRLSGEQVDGKGFFRKNWLRLTW

SEQ ID NO: 5919 - protein, 26 aa, Artificial Sequence
  Description of Artificial Sequence: Synthetic peptide
  MOD_RES (7)..(7): phosphorylated serine
ASISRLSGEQVDGKGFFRKNWLRLTW

SEQ ID NO: 5920 - protein, 27 aa, Artificial Sequence
  Description of Artificial Sequence: Synthetic peptide
  MOD_RES (2)..(2): phosphorylated serine
  MOD_RES (4)..(4): phosphorylated serine
ASISRLSGEQVDGKGQFFRKNWLRLTW

SEQ ID NO: 5921 - protein, 27 aa, Artificial Sequence
  Description of Artificial Sequence: Synthetic peptide
  MOD_RES (2)..(2): phosphorylated serine
ASISRLSGEQVDKGKGFFRKNWLRLTW

SEQ ID NO: 5922 - protein, 24 aa, Artificial Sequence
  Description of Artificial Sequence: Synthetic peptide
  MOD_RES (5)..(5): phosphorylated serine
ASKASPTLDFTERFFRKNWLRLTW

SEQ ID NO: 5923 - protein, 38 aa, Artificial Sequence
  Description of Artificial Sequence: Synthetic polypeptide
  MOD_RES (22)..(22): phosphorylated serine
  MOD_RES (24)..(24): phosphorylated serine
ASKMTQPQSKSAFPLSRKNKGSGSLDGFFRKNWLRLTW

SEQ ID NO: 5924 - protein, 18 aa, Artificial Sequence
  Description of Artificial Sequence: Synthetic peptide
  MOD_RES (2)..(2): phosphorylated serine
ASLGFVFFFRKNWLRLTW

SEQ ID NO: 5925 - protein, 27 aa, Artificial Sequence
  Description of Artificial Sequence: Synthetic peptide
  MOD_RES (2)..(2): phosphorylated serine
ASPTIEAQGTSPAHDNFFRKNWLRLTW

SEQ ID NO: 5926 - protein, 28 aa, Artificial Sequence
  Description of Artificial Sequence: Synthetic peptide
  MOD_RES (2)..(2): phosphorylated serine
ASPTIEAQGTSPAHDNIFFRKNWLRLTW

SEQ ID NO: 5927 - protein, 29 aa, Artificial Sequence
  Description of Artificial Sequence: Synthetic peptide
  MOD_RES (2)..(2): phosphorylated serine
ASPTIEAQGTSPAHDNIAFFRKNWLRLTW

SEQ ID NO: 5928 - protein, 20 aa, Artificial Sequence
  Description of Artificial Sequence: Synthetic peptide
  MOD_RES (2)..(2): phosphorylated threonine
ATAGPRLGFFFRKNWLRLTW

SEQ ID NO: 5929 - protein, 20 aa, Artificial Sequence
  Description of Artificial Sequence: Synthetic peptide
  MOD_RES (2)..(2): phosphorylated threonine
ATAGPRLGWFFRKNWLRLTW

SEQ ID NO: 5930 - protein, 20 aa, Artificial Sequence
  Description of Artificial Sequence: Synthetic peptide
  MOD_RES (2)..(2): phosphorylated threonine
ATAGPRLGYFFRKNWLRLTW

SEQ ID NO: 5931 - protein, 22 aa, Artificial Sequence
  Description of Artificial Sequence: Synthetic peptide
  MOD_RES (7)..(7): phosphorylated threonine
ATDEIGTPRKFFFRKNWLRLTW

SEQ ID NO: 5932 - protein, 22 aa, Artificial Sequence
  Description of Artificial Sequence: Synthetic peptide
  MOD_RES (7)..(7): phosphorylated threonine
ATDEIGTPRKYFFRKNWLRLTW

SEQ ID NO: 5933 - protein, 22 aa, Artificial Sequence
  Description of Artificial Sequence: Synthetic peptide
  MOD_RES (7)..(7): phosphorylated threonine
ATEEIGTPRKFFFRKNWLRLTW

SEQ ID NO: 5934 - protein, 22 aa, Artificial Sequence
  Description of Artificial Sequence: Synthetic peptide
  MOD_RES (7)..(7): phosphorylated threonine
ATEEIGTPRKYFFRKNWLRLTW

SEQ ID NO: 5935 - protein, 21 aa, Artificial Sequence
  Description of Artificial Sequence: Synthetic peptide
  MOD_RES (4)..(4): phosphorylated serine
ATWSGSEFEVFFRKNWLRLTW

SEQ ID NO: 5936 - protein, 20 aa, Artificial Sequence
  Description of Artificial Sequence: Synthetic peptide
  MOD_RES (4)..(4): phosphorylated threonine
ATYTPQAPKFFRKNWLRLTW

SEQ ID NO: 5937 - protein, 21 aa, Artificial Sequence
  Description of Artificial Sequence: Synthetic peptide
  MOD_RES (4)..(4): phosphorylated threonine
ATYTPQAPKYFFRKNWLRLTW

SEQ ID NO: 5938 - protein, 20 aa, Artificial Sequence
  Description of Artificial Sequence: Synthetic peptide
  MOD_RES (6)..(6): phosphorylated serine
AVIHQSLGLFFRKNWLRLTW

SEQ ID NO: 5939 - protein, 20 aa, Artificial Sequence
  Description of Artificial Sequence: Synthetic peptide
  MOD_RES (6)..(6): phosphorylated serine
AVIHQSLGVFFRKNWLRLTW

SEQ ID NO: 5940 - protein, 20 aa, Artificial Sequence
  Description of Artificial Sequence: Synthetic peptide
  MOD_RES (8)..(8): phosphorylated serine
AVRPTRLSLFFRKNWLRLTW

SEQ ID NO: 5941 - protein, 22 aa, Artificial Sequence
  Description of Artificial Sequence: Synthetic peptide
  MOD_RES (4)..(4): phosphorylated serine
AVVSPPALHNAFFRKNWLRLTW

SEQ ID NO: 5942 - protein, 22 aa, Artificial Sequence
  Description of Artificial Sequence: Synthetic peptide
  MOD_RES (4)..(4): phosphorylated serine
AVVSPPALHNVFFRKNWLRLTW

SEQ ID NO: 5943 - protein, 23 aa, Artificial Sequence
  Description of Artificial Sequence: Synthetic peptide
  MOD_RES (6)..(6): phosphorylated serine
AYEKLSAEQSPPFFRKNWLRLTW

SEQ ID NO: 5944 - protein, 20 aa, Artificial Sequence
  Description of Artificial Sequence: Synthetic peptide
  MOD_RES (5)..(5): phosphorylated serine
DAKKSPLALFFRKNWLRLTW

SEQ ID NO: 5945 - protein, 25 aa, Artificial Sequence
  Description of Artificial Sequence: Synthetic peptide
  MOD_RES (8)..(8): phosphorylated serine
DDDWTHLSSKEVDPFFRKNWLRLTW

SEQ ID NO: 5946 - protein, 26 aa, Artificial Sequence
  Description of Artificial Sequence: Synthetic peptide
  MOD_RES (8)..(8): phosphorylated serine
DDDWTHLSSKEVDPSFFRKNWLRLTW

SEQ ID NO: 5947 - protein, 27 aa, Artificial Sequence
  Description of Artificial Sequence: Synthetic peptide
  MOD_RES (8)..(8): phosphorylated serine
DDDWTHLSSKEVDPSTFFRKNWLRLTW

SEQ ID NO: 5948 - protein, 28 aa, Artificial Sequence
  Description of Artificial Sequence: Synthetic peptide
  MOD_RES (8)..(8): phosphorylated serine
DDDWTHLSSKEVDPSTGFFRKNWLRLTW

SEQ ID NO: 5949 - protein, 25 aa, Artificial Sequence
  Description of Artificial Sequence: Synthetic peptide
  MOD_RES (7)..(7): phosphorylated serine
DDWTHLSSKEVDPSFFRKNWLRLTW

SEQ ID NO: 5950 - protein, 20 aa, Artificial Sequence
  Description of Artificial Sequence: Synthetic peptide
  MOD_RES (8)..(8): phosphorylated threonine
DEFERIKTFFFRKNWLRLTW

SEQ ID NO: 5951 - protein, 20 aa, Artificial Sequence
  Description of Artificial Sequence: Synthetic peptide
  MOD_RES (8)..(8): phosphorylated threonine
DEFERIKTWFFRKNWLRLTW

SEQ ID NO: 5952 - protein, 20 aa, Artificial Sequence
  Description of Artificial Sequence: Synthetic peptide
  MOD_RES (8)..(8): phosphorylated threonine
DEFERIKTYFFRKNWLRLTW

SEQ ID NO: 5953 - protein, 20 aa, Artificial Sequence
  Description of Artificial Sequence: Synthetic peptide
  MOD_RES (8)..(8): phosphorylated serine
DEISHRASFFFRKNWLRLTW

SEQ ID NO: 5954 - protein, 20 aa, Artificial Sequence
  Description of Artificial Sequence: Synthetic peptide
  MOD_RES (8)..(8): phosphorylated serine
DEISHRASWFFRKNWLRLTW

SEQ ID NO: 5955 - protein, 20 aa, Artificial Sequence
  Description of Artificial Sequence: Synthetic peptide
  MOD_RES (8)..(8): phosphorylated serine
DEISHRASYFFRKNWLRLTW

SEQ ID NO: 5956 - protein, 20 aa, Artificial Sequence
  Description of Artificial Sequence: Synthetic peptide
  MOD_RES (8)..(8): phosphorylated serine
DERLRINSFFFRKNWLRLTW

SEQ ID NO: 5957 - protein, 20 aa, Artificial Sequence
  Description of Artificial Sequence: Synthetic peptide
  MOD_RES (8)..(8): phosphorylated serine
DERLRINSLFFRKNWLRLTW

SEQ ID NO: 5958 - protein, 20 aa, Artificial Sequence
  Description of Artificial Sequence: Synthetic peptide
  MOD_RES (8)..(8): phosphorylated serine
DERLRINSWFFRKNWLRLTW

SEQ ID NO: 5959 - protein, 20 aa, Artificial Sequence
  Description of Artificial Sequence: Synthetic peptide
  MOD_RES (8)..(8): phosphorylated serine
DERLRINSYFFRKNWLRLTW

SEQ ID NO: 5960 - protein, 26 aa, Artificial Sequence
  Description of Artificial Sequence: Synthetic peptide
  MOD_RES (4)..(4): phosphorylated serine
DKLSVIAEDSESGKQFFRKNWLRLTW

SEQ ID NO: 5961 - protein, 27 aa, Artificial Sequence
  Description of Artificial Sequence: Synthetic peptide
  MOD_RES (4)..(4): phosphorylated serine
DKLSVIAEDSESGKQNFFRKNWLRLTW

SEQ ID NO: 5962 - protein, 28 aa, Artificial Sequence
  Description of Artificial Sequence: Synthetic peptide
  MOD_RES (4)..(4): phosphorylated serine
DKLSVIAEDSESGKQNPFFRKNWLRLTW

SEQ ID NO: 5963 - protein, 29 aa, Artificial Sequence
  Description of Artificial Sequence: Synthetic peptide
  MOD_RES (4)..(4): phosphorylated serine
DKLSVIAEDSESGKQNPGFFRKNWLRLTW

SEQ ID NO: 5964 - protein, 31 aa, Artificial Sequence
  Description of Artificial Sequence: Synthetic polypeptide
  MOD_RES (4)..(4): phosphorylated serine
DKLSVIAEDSESGKQNPGDSFFRKNWLRLTW

SEQ ID NO: 5965 - protein, 20 aa, Artificial Sequence
  Description of Artificial Sequence: Synthetic peptide
  MOD_RES (6)..(6): phosphorylated serine
  MOD_RES (7)..(7): oxidized methionine
DLKRRSMSIFFRKNWLRLTW

SEQ ID NO: 5966 - protein, 20 aa, Artificial Sequence
  Description of Artificial Sequence: Synthetic peptide
  MOD_RES (6)..(6): phosphorylated serine
DLKRRSMSIFFRKNWLRLTW

SEQ ID NO: 5967 - protein, 20 aa, Artificial Sequence
  Description of Artificial Sequence: Synthetic peptide
  MOD_RES (8)..(8): phosphorylated serine
DLKSSKASLFFRKNWLRLTW

SEQ ID NO: 5968 - protein, 20 aa, Artificial Sequence
  Description of Artificial Sequence: Synthetic peptide
  MOD_RES (4)..(4): phosphorylated threonine
DLRTVEKELFFRKNWLRLTW

SEQ ID NO: 5969 - protein, 19 aa, Artificial Sequence
  Description of Artificial Sequence: Synthetic peptide
  MOD_RES (3)..(3): phosphorylated serine
DLSEEKFLFFRKNWLRLTW

SEQ ID NO: 5970 - protein, 19 aa, Artificial Sequence
  Description of Artificial Sequence: Synthetic peptide
  MOD_RES (3)..(3): phosphorylated serine
DLSEEKFVFFRKNWLRLTW

SEQ ID NO: 5971 - protein, 21 aa, Artificial Sequence
  Description of Artificial Sequence: Synthetic peptide
  MOD_RES (6)..(6): phosphorylated serine
DLVPLSPLKKFFRKNWLRLTW

SEQ ID NO: 5972 - protein, 21 aa, Artificial Sequence
  Description of Artificial Sequence: Synthetic peptide
  MOD_RES (6)..(6): phosphorylated threonine
DLWKITKVMDFFRKNWLRLTW

SEQ ID NO: 5973 - protein, 21 aa, Artificial Sequence
  Description of Artificial Sequence: Synthetic peptide
  MOD_RES (6)..(6): phosphorylated serine
DMVPLSPLKKFFRKNWLRLTW

SEQ ID NO: 5974 - protein, 29 aa, Artificial Sequence
  Description of Artificial Sequence: Synthetic peptide
  MOD_RES (10)..(10): phosphorylated threonine
DPTRRFFKVTPPPGSGPQFFRKNWLRLTW

SEQ ID NO: 5975 - protein, 20 aa, Artificial Sequence
  Description of Artificial Sequence: Synthetic peptide
  MOD_RES (8)..(8): phosphorylated threonine
DQFERIKTLFFRKNWLRLTW

SEQ ID NO: 5976 - protein, 20 aa, Artificial Sequence
  Description of Artificial Sequence: Synthetic peptide
  MOD_RES (8)..(8): phosphorylated serine
DQISHRASLFFRKNWLRLTW

SEQ ID NO: 5977 - protein, 21 aa, Artificial Sequence
  Description of Artificial Sequence: Synthetic peptide
  MOD_RES (6)..(6): phosphorylated serine
DSDPLSPLKYFFRKNWLRLTW

SEQ ID NO: 5978 - protein, 21 aa, Artificial Sequence
  Description of Artificial Sequence: Synthetic peptide
  MOD_RES (6)..(6): phosphorylated serine
DSEPLSPLKYFFRKNWLRLTW

SEQ ID NO: 5979 - protein, 19 aa, Artificial Sequence
  Description of Artificial Sequence: Synthetic peptide
  MOD_RES (3)..(3): phosphorylated serine
DSSEEKFLFFRKNWLRLTW

SEQ ID NO: 5980 - protein, 19 aa, Artificial Sequence
  Description of Artificial Sequence: Synthetic peptide
  MOD_RES (3)..(3): phosphorylated serine
DSSEEKFVFFRKNWLRLTW

SEQ ID NO: 5981 - protein, 21 aa, Artificial Sequence
  Description of Artificial Sequence: Synthetic peptide
  MOD_RES (6)..(6): phosphorylated serine
DSVPLSPLKYFFRKNWLRLTW

SEQ ID NO: 5982 - protein, 21 aa, Artificial Sequence
  Description of Artificial Sequence: Synthetic peptide
  MOD_RES (6)..(6): phosphorylated serine
DTDPLSPLKYFFRKNWLRLTW

SEQ ID NO: 5983 - protein, 21 aa, Artificial Sequence
  Description of Artificial Sequence: Synthetic peptide
  MOD_RES (6)..(6): phosphorylated serine
DTEPLSPLKYFFRKNWLRLTW

SEQ ID NO: 5984 - protein, 21 aa, Artificial Sequence
  Description of Artificial Sequence: Synthetic peptide
  MOD_RES (6)..(6): phosphorylated serine
DTVPLSPLKYFFRKNWLRLTW

SEQ ID NO: 5985 - protein, 24 aa, Artificial Sequence
  Description of Artificial Sequence: Synthetic peptide
  MOD_RES (6)..(6): phosphorylated serine
DWTHLSSKEVDPSFFRKNWLRLTW

SEQ ID NO: 5986 - protein, 26 aa, Artificial Sequence
  Description of Artificial Sequence: Synthetic peptide
  MOD_RES (6)..(6): phosphorylated serine
DWTHLSSKEVDPSTGFFRKNWLRLTW

SEQ ID NO: 5987 - protein, 30 aa, Artificial Sequence
  Description of Artificial Sequence: Synthetic polypeptide
  MOD_RES (4)..(4): phosphorylated serine
EEGSPTMVEKGLEPGVFTLFFRKNWLRLTW

SEQ ID NO: 5988 - protein, 20 aa, Artificial Sequence
  Description of Artificial Sequence: Synthetic peptide
  MOD_RES (4)..(4): phosphorylated serine
EELSPTAKFFFRKNWLRLTW

SEQ ID NO: 5989 - protein, 20 aa, Artificial Sequence
  Description of Artificial Sequence: Synthetic peptide
  MOD_RES (4)..(4): phosphorylated serine
EELSPTKAFFFRKNWLRLTW

SEQ ID NO: 5990 - protein, 35 aa, Artificial Sequence
  Description of Artificial Sequence: Synthetic polypeptide
  MOD_RES (10)..(10): phosphorylated serine
EEMPENALPSDEDDKDPNDPYRALFFRKNWLRLTW

SEQ ID NO: 5991 - protein, 20 aa, Artificial Sequence
  Description of Artificial Sequence: Synthetic peptide
  MOD_RES (5)..(5): phosphorylated serine
EERRSPPAPFFRKNWLRLTW

SEQ ID NO: 5992 - protein, 21 aa, Artificial Sequence
  Description of Artificial Sequence: Synthetic peptide
  MOD_RES (3)..(3): phosphorylated serine
EESSDDGKKFFFRKNWLRLTW

SEQ ID NO: 5993 - protein, 21 aa, Artificial Sequence
  Description of Artificial Sequence: Synthetic peptide
  MOD_RES (4)..(4): phosphorylated serine
EESSDDGKKFFFRKNWLRLTW

SEQ ID NO: 5994 - protein, 21 aa, Artificial Sequence
  Description of Artificial Sequence: Synthetic peptide
  MOD_RES (3)..(3): phosphorylated serine
EESSDDGKKWFFRKNWLRLTW

SEQ ID NO: 5995 - protein, 21 aa, Artificial Sequence
  Description of Artificial Sequence: Synthetic peptide
  MOD_RES (4)..(4): phosphorylated serine
EESSDDGKKWFFRKNWLRLTW

SEQ ID NO: 5996 - protein, 21 aa, Artificial Sequence
  Description of Artificial Sequence: Synthetic peptide
  MOD_RES (3)..(3): phosphorylated serine
EESSDDGKKYFFRKNWLRLTW

SEQ ID NO: 5997 - protein, 21 aa, Artificial Sequence
  Description of Artificial Sequence: Synthetic peptide
  MOD_RES (4)..(4): phosphorylated serine
EESSDDGKKYFFRKNWLRLTW

SEQ ID NO: 5998 - protein, 34 aa, Artificial Sequence
  Description of Artificial Sequence: Synthetic polypeptide
  MOD_RES (9)..(9): phosphorylated serine
EGEEPTVYSDEEEPKDESARKNDFFRKNWLRLTW

SEQ ID NO: 5999 - protein, 29 aa, Artificial Sequence
  Description of Artificial Sequence: Synthetic peptide
  MOD_RES (3)..(3): phosphorylated serine
EGSPTMVEKGLEPGVFTLFFRKNWLRLTW

SEQ ID NO: 6000 - protein, 20 aa, Artificial Sequence
  Description of Artificial Sequence: Synthetic peptide
  MOD_RES (5)..(5): phosphorylated serine
ELFSSPPAVFFRKNWLRLTW

SEQ ID NO: 6001 - protein, 21 aa, Artificial Sequence
  Description of Artificial Sequence: Synthetic peptide
  MOD_RES (5)..(5): phosphorylated serine
ELKKSPTSLKFFRKNWLRLTW

SEQ ID NO: 6002 - protein, 21 aa, Artificial Sequence
  Description of Artificial Sequence: Synthetic peptide
  MOD_RES (5)..(5): phosphorylated serine
ELKKSPTSLYFFRKNWLRLTW

SEQ ID NO: 6003 - protein, 23 aa, Artificial Sequence
  Description of Artificial Sequence: Synthetic peptide
  MOD_RES (9)..(9): phosphorylated serine
ELLMPHRISSHFFFRKNWLRLTW

SEQ ID NO: 6004 - protein, 24 aa, Artificial Sequence
  Description of Artificial Sequence: Synthetic peptide
  MOD_RES (9)..(9): phosphorylated serine
ELLMPHRISSHFLFFRKNWLRLTW

SEQ ID NO: 6005 - protein, 21 aa, Artificial Sequence
  Description of Artificial Sequence: Synthetic peptide
  MOD_RES (7)..(7): phosphorylated serine
ELRISGSVQLFFRKNWLRLTW

SEQ ID NO: 6006 - protein, 21 aa, Artificial Sequence
  Description of Artificial Sequence: Synthetic peptide
  MOD_RES (5)..(5): phosphorylated serine
EMKKSPTSLKFFRKNWLRLTW

SEQ ID NO: 6007 - protein, 32 aa, Artificial Sequence
  Description of Artificial Sequence: Synthetic polypeptide
  MOD_RES (4)..(4): phosphorylated serine
  MOD_RES (8)..(8): phosphorylated serine
  MOD_RES (13)..(13): phosphorylated serine
EPASPAASISRLSGEQVDGKGFFRKNWLRLTW

SEQ ID NO: 6008 - protein, 32 aa, Artificial Sequence; identical to SEQ ID NO: 6007
  Description of Artificial Sequence: Synthetic polypeptide
  MOD_RES (4)..(4): phosphorylated serine
  MOD_RES (8)..(8): phosphorylated serine

SEQ ID NO: 6009 - protein, 20 aa, Artificial Sequence
  Description of Artificial Sequence: Synthetic peptide
  MOD_RES (6)..(6): phosphorylated serine
EPKRRSARFFFRKNWLRLTW

SEQ ID NO: 6010 - protein, 20 aa, Artificial Sequence
  Description of Artificial Sequence: Synthetic peptide
  MOD_RES (6)..(6): phosphorylated serine
EPKRRSARLFFRKNWLRLTW

SEQ ID NO: 6011 - protein, 20 aa, Artificial Sequence
  Description of Artificial Sequence: Synthetic peptide
  MOD_RES (6)..(6): phosphorylated serine
EPKRRSARMFFRKNWLRLTW

SEQ ID NO: 6012 - protein, 20 aa, Artificial Sequence
  Description of Artificial Sequence: Synthetic peptide
  MOD_RES (6)..(6): phosphorylated serine
EPKRRSARVFFRKNWLRLTW

SEQ ID NO: 6013 - protein, 20 aa, Artificial Sequence
  Description of Artificial Sequence: Synthetic peptide
  MOD_RES (4)..(4): phosphorylated serine
EPRSPSHSFFFRKNWLRLTW

SEQ ID NO: 6014 - protein, 20 aa, Artificial Sequence
  Description of Artificial Sequence: Synthetic peptide
  MOD_RES (4)..(4): phosphorylated serine
EPRSPSHSLFFRKNWLRLTW

SEQ ID NO: 6015 - protein, 20 aa, Artificial Sequence
  Description of Artificial Sequence: Synthetic peptide
  MOD_RES (4)..(4): phosphorylated serine
EPRSPSHSMFFRKNWLRLTW

SEQ ID NO: 6016 - protein, 20 aa, Artificial Sequence
  Description of Artificial Sequence: Synthetic peptide
  MOD_RES (4)..(4): phosphorylated serine
EPRSPSHSVFFRKNWLRLTW

SEQ ID NO: 6017 - protein, 26 aa, Artificial Sequence
  Description of Artificial Sequence: Synthetic peptide
  MOD_RES (3)..(3): phosphorylated serine
ERSPLLSQETAGQKPFFRKNWLRLTW

SEQ ID NO: 6018 - protein, 27 aa, Artificial Sequence
  Description of Artificial Sequence: Synthetic peptide
  MOD_RES (3)..(3): phosphorylated serine
ERSPLLSQETAGQKPLFFRKNWLRLTW

SEQ ID NO: 6019 - protein, 19 aa, Artificial Sequence
  Description of Artificial Sequence: Synthetic peptide
  MOD_RES (4)..(4): phosphorylated serine
ESDSLPRYFFRKNWLRLTW

SEQ ID NO: 6020 - protein, 19 aa, Artificial Sequence
  Description of Artificial Sequence: Synthetic peptide
  MOD_RES (4)..(4): phosphorylated serine
ESESLPRYFFRKNWLRLTW

SEQ ID NO: 6021 - protein, 24 aa, Artificial Sequence
  Description of Artificial Sequence: Synthetic peptide
  MOD_RES (3)..(3): phosphorylated serine
ESSVRSQEDQLSRFFRKNWLRLTW

SEQ ID NO: 6022 - protein, 25 aa, Artificial Sequence
  Description of Artificial Sequence: Synthetic peptide
  MOD_RES (3)..(3): phosphorylated serine
ESSVRSQEDQLSRRFFRKNWLRLTW

SEQ ID NO: 6023 - protein, 19 aa, Artificial Sequence
  Description of Artificial Sequence: Synthetic peptide
  MOD_RES (4)..(4): phosphorylated serine
ETDSLPRYFFRKNWLRLTW

SEQ ID NO: 6024 - protein, 19 aa, Artificial Sequence
  Description of Artificial Sequence: Synthetic peptide
  MOD_RES (4)..(4): phosphorylated serine
ETESLPRYFFRKNWLRLTW

SEQ ID NO: 6025 - protein, 24 aa, Artificial Sequence
  Description of Artificial Sequence: Synthetic peptide
  MOD_RES (9)..(9): phosphorylated serine
FDKHTLGDSDNESFFRKNWLRLTW

SEQ ID NO: 6026 - protein, 21 aa, Artificial Sequence
  Description of Artificial Sequence: Synthetic peptide
  MOD_RES (6)..(6): phosphorylated serine
FEDDDSNEKLFFRKNWLRLTW

SEQ ID NO: 6027 - protein, 19 aa, Artificial Sequence
  Description of Artificial Sequence: Synthetic peptide
  MOD_RES (4)..(4): phosphorylated serine
FIESPSKLFFRKNWLRLTW

SEQ ID NO: 6028 - protein, 19 aa, Artificial Sequence
  Description of Artificial Sequence: Synthetic peptide
  MOD_RES (4)..(4): phosphorylated serine
FIESPSKYFFRKNWLRLTW

SEQ ID NO: 6029 - protein, 22 aa, Artificial Sequence
  Description of Artificial Sequence: Synthetic peptide
  MOD_RES (4)..(4): phosphorylated serine
FIGSPTTPAGLFFRKNWLRLTW

SEQ ID NO: 6030 - protein, 23 aa, Artificial Sequence
  Description of Artificial Sequence: Synthetic peptide
  MOD_RES (8)..(8): phosphorylated serine
FKMPQEKSPGYSFFRKNWLRLTW

SEQ ID NO: 6031 - protein, 20 aa, Artificial Sequence
  Description of Artificial Sequence: Synthetic peptide
  MOD_RES (3)..(3): phosphorylated serine
FKSPVKTIRFFRKNWLRLTW

SEQ ID NO: 6032 - protein, 19 aa, Artificial Sequence
  Description of Artificial Sequence: Synthetic peptide
  MOD_RES (3)..(3): phosphorylated threonine
FKTQPVTFFFRKNWLRLTW

SEQ ID NO: 6033 - protein, 20 aa, Artificial Sequence
  Description of Artificial Sequence: Synthetic peptide
  MOD_RES (5)..(5): phosphorylated serine
FLDNSFEKVFFRKNWLRLTW

SEQ ID NO: 6034 - protein, 22 aa, Artificial Sequence
  Description of Artificial Sequence: Synthetic peptide
  MOD_RES (7)..(7): phosphorylated threonine
FLDRPPTPLFIFFRKNWLRLTW

SEQ ID NO: 6035 - protein, 20 aa, Artificial Sequence
  Description of Artificial Sequence: Synthetic peptide
  MOD_RES (4)..(4): phosphorylated serine
FLDSLRDLIFFRKNWLRLTW

SEQ ID NO: 6036 - protein, 20 aa, Artificial Sequence
  Description of Artificial Sequence: Synthetic peptide
  MOD_RES (4)..(4): phosphorylated threonine
FLDTPIAKVFFRKNWLRLTW

SEQ ID NO: 6037 - protein, 23 aa, Artificial Sequence
  Description of Artificial Sequence: Synthetic peptide
  MOD_RES (8)..(8): phosphorylated serine
FLFDKPVSPLLLFFRKNWLRLTW

SEQ ID NO: 6038 - protein, 20 aa, Artificial Sequence
  Description of Artificial Sequence: Synthetic peptide
  MOD_RES (8)..(8): phosphorylated serine
FLGVRPKSAFFRKNWLRLTW

SEQ ID NO: 6039 - protein, 21 aa, Artificial Sequence
  Description of Artificial Sequence: Synthetic peptide
  MOD_RES (6)..(6): phosphorylated threonine
FLIIRTVLQLFFRKNWLRLTW

SEQ ID NO: 6040 - protein, 25 aa, Artificial Sequence
  Description of Artificial Sequence: Synthetic peptide
  MOD_RES (10)..(10): phosphorylated serine
FLITGGGKGSGFSLFFRKNWLRLTW

SEQ ID NO: 6041 - protein, 21 aa, Artificial Sequence
  Description of Artificial Sequence: Synthetic peptide
  MOD_RES (4)..(4): phosphorylated serine
FLLSQNFDDEFFRKNWLRLTW

SEQ ID NO: 6042 - protein, 20 aa, Artificial Sequence
  Description of Artificial Sequence: Synthetic peptide
  MOD_RES (4)..(4): phosphorylated serine
FLYSGKETKFFRKNWLRLTW

SEQ ID NO: 6043 - protein, 20 aa, Artificial Sequence
  Description of Artificial Sequence: Synthetic peptide
  MOD_RES (4)..(4): phosphorylated serine
FLYSGKETYFFRKNWLRLTW

SEQ ID NO: 6044 - protein, 20 aa, Artificial Sequence
  Description of Artificial Sequence: Synthetic peptide
  MOD_RES (4)..(4): phosphorylated serine
FPHSLLSVFFFRKNWLRLTW

SEQ ID NO: 6045 - protein, 20 aa, Artificial Sequence
  Description of Artificial Sequence: Synthetic peptide
  MOD_RES (4)..(4): phosphorylated serine
FPHSLLSVIFFRKNWLRLTW

SEQ ID NO: 6046 - protein, 20 aa, Artificial Sequence
  Description of Artificial Sequence: Synthetic peptide
  MOD_RES (4)..(4): phosphorylated serine
FPHSLLSVLFFRKNWLRLTW

SEQ ID NO: 6047 - protein, 20 aa, Artificial Sequence
  Description of Artificial Sequence: Synthetic peptide
  MOD_RES (4)..(4): phosphorylated serine
FPHSLLSVMFFRKNWLRLTW

SEQ ID NO: 6048 - protein, 20 aa, Artificial Sequence
  Description of Artificial Sequence: Synthetic peptide
  MOD_RES (4)..(4): phosphorylated serine
FPHSLLSVVFFRKNWLRLTW

SEQ ID NO: 6049 - protein, 19 aa, Artificial Sequence
  Description of Artificial Sequence: Synthetic peptide
  MOD_RES (4)..(4): phosphorylated serine
FPISPVRFFFRKNWLRLTW

SEQ ID NO: 6050 - protein, 19 aa, Artificial Sequence
  Description of Artificial Sequence: Synthetic peptide
  MOD_RES (4)..(4): phosphorylated serine
FPISPVRLFFRKNWLRLTW

SEQ ID NO: 6051 - protein, 19 aa, Artificial Sequence
  Description of Artificial Sequence: Synthetic peptide
  MOD_RES (4)..(4): phosphorylated serine
FPISPVRMFFRKNWLRLTW

SEQ ID NO: 6052 - protein, 19 aa, Artificial Sequence
  Description of Artificial Sequence: Synthetic peptide
  MOD_RES (4)..(4): phosphorylated serine
FPISPVRVFFRKNWLRLTW

SEQ ID NO: 6053 - protein, 22 aa, Artificial Sequence
  Description of Artificial Sequence: Synthetic peptide
  MOD_RES (5)..(5): phosphorylated serine
FPLDSPKTLVLFFRKNWLRLTW

SEQ ID NO: 6054 - protein, 20 aa, Artificial Sequence
  Description of Artificial Sequence: Synthetic peptide
  MOD_RES (6)..(6): phosphorylated serine
FPRRHSVTLFFRKNWLRLTW

SEQ ID NO: 6055 - protein, 21 aa, Artificial Sequence
  Description of Artificial Sequence: Synthetic peptide
  MOD_RES (4)..(4): phosphorylated serine
FPRSPTKSSFFFRKNWLRLTW

SEQ ID NO: 6056 - protein, 21 aa, Artificial Sequence
  Description of Artificial Sequence: Synthetic peptide
  MOD_RES (4)..(4): phosphorylated serine
FPRSPTKSSLFFRKNWLRLTW

SEQ ID NO: 6057 - protein, 23 aa, Artificial Sequence
  Description of Artificial Sequence: Synthetic peptide
  MOD_RES (4)..(4): phosphorylated serine
FPRSPTKSSLDFFFRKNWLRLTW

SEQ ID NO: 6058 - protein, 23 aa, Artificial Sequence
  Description of Artificial Sequence: Synthetic peptide
  MOD_RES (4)..(4): phosphorylated serine
FPRSPTKSSLDLFFRKNWLRLTW

SEQ ID NO: 6059 - protein, 23 aa, Artificial Sequence
  Description of Artificial Sequence: Synthetic peptide
  MOD_RES (4)..(4): phosphorylated serine
FPRSPTKSSLDMFFRKNWLRLTW

SEQ ID NO: 6060 - protein, 23 aa, Artificial Sequence
  Description of Artificial Sequence: Synthetic peptide
  MOD_RES (4)..(4): phosphorylated serine
FPRSPTKSSLDVFFRKNWLRLTW

SEQ ID NO: 6061 - protein, 21 aa, Artificial Sequence
  Description of Artificial Sequence: Synthetic peptide
  MOD_RES (4)..(4): phosphorylated serine
FPRSPTKSSMFFRKNWLRLTW

SEQ ID NO: 6062 - protein, 21 aa, Artificial Sequence
  Description of Artificial Sequence: Synthetic peptide
  MOD_RES (4)..(4): phosphorylated serine
FPRSPTKSSVFFRKNWLRLTW

SEQ ID NO: 6063 - protein, 20 aa, Artificial Sequence
  Description of Artificial Sequence: Synthetic peptide
  MOD_RES (4)..(4): phosphorylated serine
FRFSGRTEYFFRKNWLRLTW

SEQ ID NO: 6064 - protein, 20 aa, Artificial Sequence
  Description of Artificial Sequence: Synthetic peptide
  MOD_RES (7)..(7): phosphorylated serine
FRGRYRSPYFFRKNWLRLTW

SEQ ID NO: 6065 - protein, 20 aa, Artificial Sequence
  Description of Artificial Sequence: Synthetic peptide
  MOD_RES (4)..(4): phosphorylated serine
FRKSMVEHYFFRKNWLRLTW

SEQ ID NO: 6066 - protein, 23 aa, Artificial Sequence
  Description of Artificial Sequence: Synthetic peptide
  MOD_RES (4)..(4): phosphorylated serine
FRRSPIKSSLDYFFRKNWLRLTW

SEQ ID NO: 6067 - protein, 21 aa, Artificial Sequence
  Description of Artificial Sequence: Synthetic peptide
  MOD_RES (4)..(4): phosphorylated serine
FRRSPTKSSFFFRKNWLRLTW

SEQ ID NO: 6068 - protein, 21 aa, Artificial Sequence
  Description of Artificial Sequence: Synthetic peptide
  MOD_RES (4)..(4): phosphorylated serine
FRRSPTKSSLFFRKNWLRLTW

SEQ ID NO: 6069 - protein, 22 aa, Artificial Sequence
  Description of Artificial Sequence: Synthetic peptide
  MOD_RES (4)..(4): phosphorylated serine
FRRSPTKSSLDFFRKNWLRLTW

SEQ ID NO: 6070 - protein, 23 aa, Artificial Sequence
  Description of Artificial Sequence: Synthetic peptide
  MOD_RES (4)..(4): phosphorylated serine
FRRSPTKSSLDFFFRKNWLRLTW

SEQ ID NO: 6071 - protein, 23 aa, Artificial Sequence
  Description of Artificial Sequence: Synthetic peptide
  MOD_RES (4)..(4): phosphorylated serine
FRRSPTKSSLDLFFRKNWLRLTW

SEQ ID NO: 6072 - protein, 23 aa, Artificial Sequence
  Description of Artificial Sequence: Synthetic peptide
  MOD_RES (4)..(4): phosphorylated serine
FRRSPTKSSLDMFFRKNWLRLTW

SEQ ID NO: 6073 - protein, 23 aa, Artificial Sequence
  Description of Artificial Sequence: Synthetic peptide
  MOD_RES (4)..(4): phosphorylated serine
FRRSPTKSSLDVFFRKNWLRLTW

SEQ ID NO: 6074 - protein, 23 aa, Artificial Sequence
  Description of Artificial Sequence: Synthetic peptide
  MOD_RES (4)..(4): phosphorylated serine
FRRSPTKSSLDYFFRKNWLRLTW

SEQ ID NO: 6075 - protein, 21 aa, Artificial Sequence
  Description of Artificial Sequence: Synthetic peptide
  MOD_RES (4)..(4): phosphorylated serine
FRRSPTKSSMFFRKNWLRLTW

SEQ ID NO: 6076 - protein, 21 aa, Artificial Sequence
  Description of Artificial Sequence: Synthetic peptide
  MOD_RES (4)..(4): phosphorylated serine
FRRSPTKSSVFFRKNWLRLTW

SEQ ID NO: 6077 - protein, 22 aa, Artificial Sequence
  Description of Artificial Sequence: Synthetic peptide
  MOD_RES (3)..(3): phosphorylated serine
FRSPTKSSLDFFFRKNWLRLTW

SEQ ID NO: 6078 - protein, 22 aa, Artificial Sequence
  Description of Artificial Sequence: Synthetic peptide
  MOD_RES (3)..(3): phosphorylated serine
FRSPTKSSLDLFFRKNWLRLTW

SEQ ID NO: 6079 - protein, 22 aa, Artificial Sequence
  Description of Artificial Sequence: Synthetic peptide
  MOD_RES (3)..(3): phosphorylated serine
FRSPTKSSLDMFFRKNWLRLTW

SEQ ID NO: 6080 - protein, 22 aa, Artificial Sequence
  Description of Artificial Sequence: Synthetic peptide
  MOD_RES (3)..(3): phosphorylated serine
FRSPTKSSLDVFFRKNWLRLTW

SEQ ID NO: 6081 - protein, 20 aa, Artificial Sequence
  Description of Artificial Sequence: Synthetic peptide
  MOD_RES (4)..(4): phosphorylated serine
FRYSGKTEFFFRKNWLRLTW

SEQ ID NO: 6082 - protein, 20 aa, Artificial Sequence
  Description of Artificial Sequence: Synthetic peptide
  MOD_RES (4)..(4): phosphorylated serine
FRYSGKTEKFFRKNWLRLTW

SEQ ID NO: 6083 - protein, 20 aa, Artificial Sequence
  Description of Artificial Sequence: Synthetic peptide
  MOD_RES (4)..(4): phosphorylated serine
FRYSGKTELFFRKNWLRLTW

SEQ ID NO: 6084 - protein, 20 aa, Artificial Sequence
  Description of Artificial Sequence: Synthetic peptide
  MOD_RES (4)..(4): phosphorylated serine
FRYSGKTEMFFRKNWLRLTW

SEQ ID NO: 6085 - protein, 20 aa, Artificial Sequence
  Description of Artificial Sequence: Synthetic peptide
  MOD_RES (4)..(4): phosphorylated serine
FRYSGKTERFFRKNWLRLTW

SEQ ID NO: 6086 - protein, 20 aa, Artificial Sequence
  Description of Artificial Sequence: Synthetic peptide
  MOD_RES (4)..(4): phosphorylated serine
FRYSGKTEYFFRKNWLRLTW

SEQ ID NO: 6087 - protein, 21 aa, Artificial Sequence
  Description of Artificial Sequence: Synthetic peptide
  MOD_RES (4)..(4): phosphorylated serine
FSDSHEGFSYFFRKNWLRLTW

SEQ ID NO: 6088 - protein, 21 aa, Artificial Sequence
  Description of Artificial Sequence: Synthetic peptide
  MOD_RES (4)..(4): phosphorylated serine
FSESHEGFSYFFRKNWLRLTW

SEQ ID NO: 6089 - protein, 19 aa, Artificial Sequence
  Description of Artificial Sequence: Synthetic peptide
  MOD_RES (4)..(4): phosphorylated serine
FSESPSKLFFRKNWLRLTW

SEQ ID NO: 6090 - protein, 19 aa, Artificial Sequence
  Description of Artificial Sequence: Synthetic peptide
  MOD_RES (4)..(4): phosphorylated serine
FSESPSKYFFRKNWLRLTW

SEQ ID NO: 6091 - protein, 19 aa, Artificial Sequence
  Description of Artificial Sequence: Synthetic peptide
  MOD_RES (4)..(4): phosphorylated serine
FSISPVRFFFRKNWLRLTW

SEQ ID NO: 6092 - protein, 19 aa, Artificial Sequence
  Description of Artificial Sequence: Synthetic peptide
  MOD_RES (4)..(4): phosphorylated serine
FSISPVRLFFRKNWLRLTW

SEQ ID NO: 6093 - protein, 19 aa, Artificial Sequence
  Description of Artificial Sequence: Synthetic peptide
  MOD_RES (4)..(4): phosphorylated serine
FSISPVRMFFRKNWLRLTW

SEQ ID NO: 6094 - protein, 19 aa, Artificial Sequence
  Description of Artificial Sequence: Synthetic peptide
  MOD_RES (4)..(4): phosphorylated serine
FSISPVRVFFRKNWLRLTW

SEQ ID NO: 6095 - protein, 21 aa, Artificial Sequence
  Description of Artificial Sequence: Synthetic peptide
  MOD_RES (3)..(3): phosphorylated serine
FSSSHEGFSYFFRKNWLRLTW

SEQ ID NO: 6096 - protein, 21 aa, Artificial Sequence
  Description of Artificial Sequence: Synthetic peptide
  MOD_RES (4)..(4): phosphorylated serine
FSSSHEGFSYFFRKNWLRLTW

SEQ ID NO: 6097 - protein, 21 aa, Artificial Sequence
  Description of Artificial Sequence: Synthetic peptide
  MOD_RES (4)..(4): phosphorylated serine
FTDSHEGFSYFFRKNWLRLTW

SEQ ID NO: 6098 - protein, 21 aa, Artificial Sequence
  Description of Artificial Sequence: Synthetic peptide
  MOD_RES (4)..(4): phosphorylated serine
FTESHEGFSYFFRKNWLRLTW

SEQ ID NO: 6099 - protein, 19 aa, Artificial Sequence
  Description of Artificial Sequence: Synthetic peptide
  MOD_RES (4)..(4): phosphorylated serine
FTESPSKLFFRKNWLRLTW

SEQ ID NO: 6100 - protein, 19 aa, Artificial Sequence
  Description of Artificial Sequence: Synthetic peptide
  MOD_RES (4)..(4): phosphorylated serine
FTESPSKYFFRKNWLRLTW

SEQ ID NO: 6101 - protein, 20 aa, Artificial Sequence
  Description of Artificial Sequence: Synthetic peptide
  MOD_RES (4)..(4): phosphorylated serine
FTKSPYQEFFFRKNWLRLTW

SEQ ID NO: 6102 - protein, 21 aa, Artificial Sequence
  Description of Artificial Sequence: Synthetic peptide
  MOD_RES (3)..(3): phosphorylated serine
FTSSHEGFSYFFRKNWLRLTW

SEQ ID NO: 6103 - protein, 24 aa, Artificial Sequence
  Description of Artificial Sequence: Synthetic peptide
  MOD_RES (9)..(9): phosphorylated serine
FVSKVMIGSPKKVFFRKNWLRLTW

SEQ ID NO: 6104 - protein, 22 aa, Artificial Sequence
  Description of Artificial Sequence: Synthetic peptide
  MOD_RES (4)..(4): phosphorylated serine
GALSPSLLHSLFFRKNWLRLTW

SEQ ID NO: 6105 - protein, 20 aa, Artificial Sequence
  Description of Artificial Sequence: Synthetic peptide
  MOD_RES (8)..(8): phosphorylated serine
GAQPGRHSFFFRKNWLRLTW

SEQ ID NO: 6106 - protein, 20 aa, Artificial Sequence
  Description of Artificial Sequence: Synthetic peptide
  MOD_RES (8)..(8): phosphorylated serine
GAQPGRHSLFFRKNWLRLTW

SEQ ID NO: 6107 - protein, 20 aa, Artificial Sequence
  Description of Artificial Sequence: Synthetic peptide
  MOD_RES (8)..(8): phosphorylated serine
GAQPGRHSVFFRKNWLRLTW

SEQ ID NO: 6108 - protein, 25 aa, Artificial Sequence
  Description of Artificial Sequence: Synthetic peptide
  MOD_RES (9)..(9): phosphorylated serine
GDDDWTHLSSKEVDFFRKNWLRLTW

SEQ ID NO: 6109 - protein, 26 aa, Artificial Sequence
  Description of Artificial Sequence: Synthetic peptide
  MOD_RES (9)..(9): phosphorylated serine
GDDDWTHLSSKEVDPFFRKNWLRLTW

SEQ ID NO: 6110 - protein, 27 aa, Artificial Sequence
  Description of Artificial Sequence: Synthetic peptide
  MOD_RES (9)..(9): phosphorylated serine
GDDDWTHLSSKEVDPSFFRKNWLRLTW

SEQ ID NO: 6111 - protein, 28 aa, Artificial Sequence
  Description of Artificial Sequence: Synthetic peptide
  MOD_RES (9)..(9): phosphorylated serine
GDDDWTHLSSKEVDPSTFFRKNWLRLTW

SEQ ID NO: 6112 - protein, 29 aa, Artificial Sequence
  Description of Artificial Sequence: Synthetic peptide
  MOD_RES (9)..(9): phosphorylated serine
GDDDWTHLSSKEVDPSTGFFRKNWLRLTW

SEQ ID NO: 6113 - protein, 20 aa, Artificial Sequence
  Description of Artificial Sequence: Synthetic peptide
  MOD_RES (4)..(4): phosphorylated serine
GEASPSHIIFFRKNWLRLTW

SEQ ID NO: 6114 - protein, 22 aa, Artificial Sequence
  Description of Artificial Sequence: Synthetic peptide
  MOD_RES (4)..(4): phosphorylated serine
GEESSDDGKKFFFRKNWLRLTW

SEQ ID NO: 6115 - protein, 22 aa, Artificial Sequence
  Description of Artificial Sequence: Synthetic peptide
  MOD_RES (4)..(4): phosphorylated serine
GEESSDDGKKWFFRKNWLRLTW

SEQ ID NO: 6116 - protein, 22 aa, Artificial Sequence
  Description of Artificial Sequence: Synthetic peptide
  MOD_RES (4)..(4): phosphorylated serine
GEESSDDGKKYFFRKNWLRLTW

SEQ ID NO: 6117 - protein, 23 aa, Artificial Sequence
  Description of Artificial Sequence: Synthetic peptide
  MOD_RES (4)..(4): phosphorylated serine
GEESSDIDGKKFFFRKNWLRLTW

SEQ ID NO: 6118 - protein, 20 aa, Artificial Sequence
  Description of Artificial Sequence: Synthetic peptide
  MOD_RES (4)..(4): phosphorylated serine
GEISPQREVFFRKNWLRLTW

SEQ ID NO: 6119 - protein, 27 aa, Artificial Sequence
  Description of Artificial Sequence: Synthetic peptide
  MOD_RES (4)..(4): phosphorylated serine
GERSPLLSQETAGQKPFFRKNWLRLTW

SEQ ID NO: 6120 - protein, 28 aa, Artificial Sequence
  Description of Artificial Sequence: Synthetic peptide
  MOD_RES (4)..(4): phosphorylated serine
GERSPLLSQETAGQKPLFFRKNWLRLTW

SEQ ID NO: 6121 - protein, 20 aa, Artificial Sequence
  Description of Artificial Sequence: Synthetic peptide
  MOD_RES (4)..(4): phosphorylated serine
GETSPRTKIFFRKNWLRLTW

SEQ ID NO: 6122 - protein, 28 aa, Artificial Sequence
  Description of Artificial Sequence: Synthetic peptide
  MOD_RES (10)..(10): phosphorylated serine
GGDDDWTHLSSKEVDPSFFRKNWLRLTW

SEQ ID NO: 6123 - protein, 30 aa, Artificial Sequence
  Description of Artificial Sequence: Synthetic polypeptide
  MOD_RES (10)..(10): phosphorylated serine
GGDDDWTHLSSKEVDPSTGFFRKNWLRLTW

SEQ ID NO: 6124 - protein, 23 aa, Artificial Sequence
  Description of Artificial Sequence: Synthetic peptide
  MOD_RES (11)..(11): phosphorylated serine
GGSFGGRSSGSPFFRKNWLRLTW

SEQ ID NO: 6125 - protein, 23 aa, Artificial Sequence
  Description of Artificial Sequence: Synthetic peptide
  MOD_RES (11)..(11): phosphorylated serine
GGSFGGRSSGSVFFRKNWLRLTW

SEQ ID NO: 6126 - protein, 20 aa, Artificial Sequence
  Description of Artificial Sequence: Synthetic peptide
  MOD_RES (4)..(4): phosphorylated serine
GIDSPSSSVFFRKNWLRLTW

SEQ ID NO: 6127 - protein, 20 aa, Artificial Sequence
  Description of Artificial Sequence: Synthetic peptide
  MOD_RES (4)..(4): phosphorylated serine
GIMSPLAKKFFRKNWLRLTW

SEQ ID NO: 6128 - protein, 20 aa, Artificial Sequence
  Description of Artificial Sequence: Synthetic peptide
  MOD_RES (5)..(5): phosphorylated threonine
GLAPTPPSMFFRKNWLRLTW

SEQ ID NO: 6129 - protein, 20 aa, Artificial Sequence
  Description of Artificial Sequence: Synthetic peptide
  MOD_RES (4)..(4): phosphorylated serine
GLDSGFHSVFFRKNWLRLTW

SEQ ID NO: 6130 - protein, 21 aa, Artificial Sequence
  Description of Artificial Sequence: Synthetic peptide
  MOD_RES (4)..(4): phosphorylated serine
GLDSLDQVEIFFRKNWLRLTW

SEQ ID NO: 6131 - protein, 20 aa, Artificial Sequence
  Description of Artificial Sequence: Synthetic peptide
  MOD_RES (8)..(8): phosphorylated serine
GLGELLRSLFFRKNWLRLTW

SEQ ID NO: 6132 - protein, 22 aa, Artificial Sequence
  Description of Artificial Sequence: Synthetic peptide
  MOD_RES (7)..(7): phosphorylated serine
GLIRSRSFIFKFFRKNWLRLTW

SEQ ID NO: 6133 - protein, 22 aa, Artificial Sequence
  Description of Artificial Sequence: Synthetic peptide
  MOD_RES (7)..(7): phosphorylated serine
GLIRSRSFIFYFFRKNWLRLTW

SEQ ID NO: 6134 - protein, 21 aa, Artificial Sequence
  Description of Artificial Sequence: Synthetic peptide
  MOD_RES (4)..(4): phosphorylated serine
GLISPELRHLFFRKNWLRLTW

SEQ ID NO: 6135 - protein, 20 aa, Artificial Sequence
  Description of Artificial Sequence: Synthetic peptide
  MOD_RES (4)..(4): phosphorylated serine
GLISPNVQLFFRKNWLRLTW

SEQ ID NO: 6136 - protein, 20 aa, Artificial Sequence
  Description of Artificial Sequence: Synthetic peptide
  MOD_RES (4)..(4): phosphorylated serine
GLISPVWGAFFRKNWLRLTW

SEQ ID NO: 6137 - protein, 22 aa, Artificial Sequence
  Description of Artificial Sequence: Synthetic peptide
  MOD_RES (4)..(4): phosphorylated threonine
GLITPGGFSSVFFRKNWLRLTW

SEQ ID NO: 6138 - protein, 20 aa, Artificial Sequence
  Description of Artificial Sequence: Synthetic peptide
  MOD_RES (5)..(5): phosphorylated serine
GLLDSPTSIFFRKNWLRLTW

SEQ ID NO: 6139 - protein, 20 aa, Artificial Sequence
  Description of Artificial Sequence: Synthetic peptide
  MOD_RES (5)..(5): phosphorylated serine
GLLGSPARLFFRKNWLRLTW

SEQ ID NO: 6140 - protein, 20 aa, Artificial Sequence
  Description of Artificial Sequence: Synthetic peptide
  MOD_RES (5)..(5): phosphorylated serine
GLLGSPVRAFFRKNWLRLTW

SEQ ID NO: 6141 - protein, 20 aa, Artificial Sequence
  Description of Artificial Sequence: Synthetic peptide
  MOD_RES (5)..(5): phosphorylated serine
GLLGSPVRVFFRKNWLRLTW

SEQ ID NO: 6142 - protein, 22 aa, Artificial Sequence
  Description of Artificial Sequence: Synthetic peptide
  MOD_RES (4)..(4): phosphorylated serine
GLLSPARLYAIFFRKNWLRLTW

SEQ ID NO: 6143 - protein, 22 aa, Artificial Sequence
  Description of Artificial Sequence: Synthetic peptide
  MOD_RES (4)..(4): phosphorylated serine
GLLSPARLYAVFFRKNWLRLTW

SEQ ID NO: 6144 - protein, 21 aa, Artificial Sequence
  Description of Artificial Sequence: Synthetic peptide
  MOD_RES (4)..(4): phosphorylated serine
GLLSPRFVDVFFRKNWLRLTW

SEQ ID NO: 6145 - protein, 20 aa, Artificial Sequence
  Description of Artificial Sequence: Synthetic peptide
  MOD_RES (4)..(4): phosphorylated serine
GLLSPRHSLFFRKNWLRLTW

SEQ ID NO: 6146 - protein, 23 aa, Artificial Sequence
  Description of Artificial Sequence: Synthetic peptide
  MOD_RES (11)..(11): phosphorylated serine
GLSFGGRSSGSPFFRKNWLRLTW

SEQ ID NO: 6147 - protein, 23 aa, Artificial Sequence
  Description of Artificial Sequence: Synthetic peptide
  MOD_RES (11)..(11): phosphorylated serine
GLSFGGRSSGSVFFRKNWLRLTW

SEQ ID NO: 6148 - protein, 20 aa, Artificial Sequence
  Description of Artificial Sequence: Synthetic peptide
  MOD_RES (5)..(5): phosphorylated serine
GMLGSPVRVFFRKNWLRLTW

SEQ ID NO: 6149 - protein, 22 aa, Artificial Sequence
  Description of Artificial Sequence: Synthetic peptide
  MOD_RES (4)..(4): phosphorylated serine
GMLSPARLYAIFFRKNWLRLTW

SEQ ID NO: 6150 - protein, 22 aa, Artificial Sequence
  Description of Artificial Sequence: Synthetic peptide
  MOD_RES (4)..(4): phosphorylated serine
GMLSPARLYAVFFRKNWLRLTW

SEQ ID NO: 6151 - protein, 22 aa, Artificial Sequence
  Description of Artificial Sequence: Synthetic peptide
  MOD_RES (4)..(4): phosphorylated serine
GMLSPGKSIEVFFRKNWLRLTW

SEQ ID NO: 6152 - protein, 22 aa, Artificial Sequence
  Description of Artificial Sequence: Synthetic peptide
  MOD_RES (10)..(10): phosphorylated serine
GPKPLFRRMSSFFRKNWLRLTW

SEQ ID NO: 6153 - protein, 23 aa, Artificial Sequence
  Description of Artificial Sequence: Synthetic peptide
  MOD_RES (10)..(10): phosphorylated serine
GPKPLFRRMSSLFFRKNWLRLTW

SEQ ID NO: 6154 - protein, 24 aa, Artificial Sequence
  Description of Artificial Sequence: Synthetic peptide
  MOD_RES (10)..(10): phosphorylated serine
GPKPLFRRMSSLVFFRKNWLRLTW

SEQ ID NO: 6155 - protein, 25 aa, Artificial Sequence
  Description of Artificial Sequence: Synthetic peptide
  MOD_RES (10)..(10): phosphorylated serine
GPKPLFRRMSSLVGFFRKNWLRLTW

SEQ ID NO: 6156 - protein, 26 aa, Artificial Sequence
  Description of Artificial Sequence: Synthetic peptide
  MOD_RES (10)..(10): phosphorylated serine
GPKPLFRRMSSLVGPFFRKNWLRLTW

SEQ ID NO: 6157 - protein, 27 aa, Artificial Sequence
  Description of Artificial Sequence: Synthetic peptide
  MOD_RES (10)..(10): phosphorylated serine
GPKPLFRRMSSLVGPTFFRKNWLRLTW

SEQ ID NO: 6158 - protein, 28 aa, Artificial Sequence
  Description of Artificial Sequence: Synthetic peptide
  MOD_RES (10)..(10): phosphorylated serine
GPKPLFRRMSSLVGPTQFFRKNWLRLTW

SEQ ID NO: 6159 - protein, 29 aa, Artificial Sequence
  Description of Artificial Sequence: Synthetic peptide
  MOD_RES (10)..(10): phosphorylated serine
GPKPLFRRMSSLVGPTQSFFRKNWLRLTW

SEQ ID NO: 6160 - protein, 21 aa, Artificial Sequence
  Description of Artificial Sequence: Synthetic peptide
  MOD_RES (9)..(9): phosphorylated serine
GPPYQRRGSLFFRKNWLRLTW

SEQ ID NO: 6161 - protein, 20 aa, Artificial Sequence
  Description of Artificial Sequence: Synthetic peptide
  MOD_RES (8)..(8): phosphorylated serine
GPQPGRHSFFFRKNWLRLTW

SEQ ID NO: 6162 - protein, 20 aa, Artificial Sequence
  Description of Artificial Sequence: Synthetic peptide
  MOD_RES (8)..(8): phosphorylated serine
GPQPGRHSLFFRKNWLRLTW

SEQ ID NO: 6163 - protein, 20 aa, Artificial Sequence
  Description of Artificial Sequence: Synthetic peptide
  MOD_RES (8)..(8): phosphorylated serine
GPQPGRHSVFFRKNWLRLTW

SEQ ID NO: 6164 - protein, 21 aa, Artificial Sequence
  Description of Artificial Sequence: Synthetic peptide
  MOD_RES (6)..(6): phosphorylated serine
GPRPGSPSAFFFRKNWLRLTW

SEQ ID NO: 6165 - protein, 21 aa, Artificial Sequence
  Description of Artificial Sequence: Synthetic peptide
  MOD_RES (6)..(6): phosphorylated serine
GPRPGSPSALFFRKNWLRLTW

SEQ ID NO: 6166 - protein, 21 aa, Artificial Sequence
  Description of Artificial Sequence: Synthetic peptide
  MOD_RES (6)..(6): phosphorylated serine
GPRPGSPSAMFFRKNWLRLTW

SEQ ID NO: 6167 - protein, 21 aa, Artificial Sequence
  Description of Artificial Sequence: Synthetic peptide
  MOD_RES (6)..(6): phosphorylated serine
GPRPGSPSAVFFRKNWLRLTW

SEQ ID NO: 6168 - protein, 19 aa, Artificial Sequence
  Description of Artificial Sequence: Synthetic peptide
  MOD_RES (6)..(6): phosphorylated serine
GPRSASLLFFRKNWLRLTW

SEQ ID NO: 6169 - protein, 21 aa, Artificial Sequence
  Description of Artificial Sequence: Synthetic peptide
  MOD_RES (4)..(4): phosphorylated serine
GPRSASLLSFFFRKNWLRLTW

SEQ ID NO: 6170 - protein, 21 aa, Artificial Sequence
  Description of Artificial Sequence: Synthetic peptide
  MOD_RES (6)..(6): phosphorylated serine
  MOD_RES (9)..(9): phosphorylated serine
GPRSASLLSFFFRKNWLRLTW

SEQ ID NO: 6171 - protein, 21 aa, Artificial Sequence
  Description of Artificial Sequence: Synthetic peptide
  MOD_RES (9)..(9): phosphorylated serine
GPRSASLLSFFFRKNWLRLTW

SEQ ID NO: 6172 - protein, 21 aa, Artificial Sequence
  Description of Artificial Sequence: Synthetic peptide
  MOD_RES (4)..(4): phosphorylated serine
  MOD_RES (6)..(6): phosphorylated serine
GPRSASLLSLFFRKNWLRLTW

SEQ ID NO: 6173 - protein, 21 aa, Artificial Sequence
  Description of Artificial Sequence: Synthetic peptide
  MOD_RES (4)..(4): phosphorylated serine
GPRSASLLSLFFRKNWLRLTW

SEQ ID NO: 6174 - protein, 21 aa, Artificial Sequence
  Description of Artificial Sequence: Synthetic peptide
  MOD_RES (6)..(6): phosphorylated serine
  MOD_RES (9)..(9): phosphorylated serine
GPRSASLLSLFFRKNWLRLTW

SEQ ID NO: 6175 - protein, 21 aa, Artificial Sequence
  Description of Artificial Sequence: Synthetic peptide
  MOD_RES (6)..(6): phosphorylated serine
GPRSASLLSLFFRKNWLRLTW

SEQ ID NO: 6176 - protein, 21 aa, Artificial Sequence
  Description of Artificial Sequence: Synthetic peptide
  MOD_RES (9)..(9): phosphorylated serine
GPRSASLLSLFFRKNWLRLTW

SEQ ID NO: 6177 - protein, 21 aa, Artificial Sequence
  Description of Artificial Sequence: Synthetic peptide
  MOD_RES (4)..(4): phosphorylated serine
GPRSASLLSMFFRKNWLRLTW

SEQ ID NO: 6178 - protein, 21 aa, Artificial Sequence
  Description of Artificial Sequence: Synthetic peptide
  MOD_RES (6)..(6): phosphorylated serine
  MOD_RES (9)..(9): phosphorylated serine
GPRSASLLSMFFRKNWLRLTW

SEQ ID NO: 6179 - protein, 21 aa, Artificial Sequence
  Description of Artificial Sequence: Synthetic peptide
  MOD_RES (9)..(9): phosphorylated serine
GPRSASLLSMFFRKNWLRLTW

SEQ ID NO: 6180 - protein, 21 aa, Artificial Sequence
  Description of Artificial Sequence: Synthetic peptide
  MOD_RES (4)..(4): phosphorylated serine
GPRSASLLSVFFRKNWLRLTW

SEQ ID NO: 6181 - protein, 21 aa, Artificial Sequence
  Description of Artificial Sequence: Synthetic peptide
  MOD_RES (6)..(6): phosphorylated serine
  MOD_RES (9)..(9): phosphorylated serine
GPRSASLLSVFFRKNWLRLTW

SEQ ID NO: 6182 - protein, 21 aa, Artificial Sequence
  Description of Artificial Sequence: Synthetic peptide
  MOD_RES (9)..(9): phosphorylated serine
GPRSASLLSVFFRKNWLRLTW

SEQ ID NO: 6183 - protein, 20 aa, Artificial Sequence
  Description of Artificial Sequence: Synthetic peptide
  MOD_RES (4)..(4): phosphorylated serine
GPRSPKAPPFFRKNWLRLTW

SEQ ID NO: 6184 - protein, 20 aa, Artificial Sequence
  Description of Artificial Sequence: Synthetic peptide
  MOD_RES (4)..(4): phosphorylated serine
GPRSPPVTLFFRKNWLRLTW

SEQ ID NO: 6185 - protein, 20 aa, Artificial Sequence
  Description of Artificial Sequence: Synthetic peptide
  MOD_RES (4)..(4): phosphorylated serine
GQLSPGVQFFFRKNWLRLTW

SEQ ID NO: 6186 - protein, 20 aa, Artificial Sequence
  Description of Artificial Sequence: Synthetic peptide
  MOD_RES (4)..(4): phosphorylated serine
GRKSPPPSFFFRKNWLRLTW

SEQ ID NO: 6187 - protein, 20 aa, Artificial Sequence
  Description of Artificial Sequence: Synthetic peptide
  MOD_RES (4)..(4): phosphorylated serine
GRKSPPPSKFFRKNWLRLTW

SEQ ID NO: 6188 - protein, 20 aa, Artificial Sequence
  Description of Artificial Sequence: Synthetic peptide
  MOD_RES (4)..(4): phosphorylated serine
GRKSPPPSLFFRKNWLRLTW

SEQ ID NO: 6189 - protein, 20 aa, Artificial Sequence
  Description of Artificial Sequence: Synthetic peptide
  MOD_RES (4)..(4): phosphorylated serine
GRKSPPPSMFFRKNWLRLTW

SEQ ID NO: 6190 - protein, 20 aa, Artificial Sequence
  Description of Artificial Sequence: Synthetic peptide
  MOD_RES (4)..(4): phosphorylated serine
GRKSPPPSRFFRKNWLRLTW

SEQ ID NO: 6191 - protein, 20 aa, Artificial Sequence
  Description of Artificial Sequence: Synthetic peptide
  MOD_RES (4)..(4): phosphorylated serine
GRKSPPPSYFFRKNWLRLTW

SEQ ID NO: 6192 - protein, 20 aa, Artificial Sequence
  Description of Artificial Sequence: Synthetic peptide
  MOD_RES (5)..(5): phosphorylated serine
GRLGSPHRFFFRKNWLRLTW

SEQ ID NO: 6193 - protein, 20 aa, Artificial Sequence
  Description of Artificial Sequence: Synthetic peptide
  MOD_RES (5)..(5): phosphorylated serine
GRLGSPHRKFFRKNWLRLTW

SEQ ID NO: 6194 - protein, 20 aa, Artificial Sequence
  Description of Artificial Sequence: Synthetic peptide
  MOD_RES (5)..(5): phosphorylated serine
GRLGSPHRLFFRKNWLRLTW

SEQ ID NO: 6195 - protein, 20 aa, Artificial Sequence
  Description of Artificial Sequence: Synthetic peptide
  MOD_RES (5)..(5): phosphorylated serine
GRLGSPHRMFFRKNWLRLTW

SEQ ID NO: 6196 - protein, 20 aa, Artificial Sequence
  Description of Artificial Sequence: Synthetic peptide
  MOD_RES (5)..(5): phosphorylated serine
GRLGSPHRRFFRKNWLRLTW

SEQ ID NO: 6197 - protein, 20 aa, Artificial Sequence
  Description of Artificial Sequence: Synthetic peptide
  MOD_RES (5)..(5): phosphorylated serine
GRLGSPHRYFFRKNWLRLTW

SEQ ID NO: 6198 - protein, 20 aa, Artificial Sequence
  Description of Artificial Sequence: Synthetic peptide
  MOD_RES (4)..(4): phosphorylated serine
GRLSPAYSLFFRKNWLRLTW

SEQ ID NO: 6199 - protein, 22 aa, Artificial Sequence
  Description of Artificial Sequence: Synthetic peptide
  MOD_RES (4)..(4): phosphorylated serine
GRLSPKASQVFFFRKNWLRLTW

SEQ ID NO: 6200 - protein, 22 aa, Artificial Sequence
  Description of Artificial Sequence: Synthetic peptide
  MOD_RES (4)..(4): phosphorylated serine
GRLSPKASQVKFFRKNWLRLTW

SEQ ID NO: 6201 - protein, 22 aa, Artificial Sequence
  Description of Artificial Sequence: Synthetic peptide
  MOD_RES (4)..(4): phosphorylated serine
GRLSPKASQVLFFRKNWLRLTW

SEQ ID NO: 6202 - protein, 22 aa, Artificial Sequence
  Description of Artificial Sequence: Synthetic peptide
  MOD_RES (4)..(4): phosphorylated serine
GRLSPKASQVMFFRKNWLRLTW

SEQ ID NO: 6203 - protein, 22 aa, Artificial Sequence
  Description of Artificial Sequence: Synthetic peptide
  MOD_RES (4)..(4): phosphorylated serine
GRLSPKASQVRFFRKNWLRLTW

SEQ ID NO: 6204 - protein, 22 aa, Artificial Sequence
  Description of Artificial Sequence: Synthetic peptide
  MOD_RES (4)..(4): phosphorylated serine
GRLSPKASQVYFFRKNWLRLTW

SEQ ID NO: 6205 - protein, 21 aa, Artificial Sequence
  Description of Artificial Sequence: Synthetic peptide
  MOD_RES (4)..(4): phosphorylated serine
GRLSPVPVPFFFRKNWLRLTW

SEQ ID NO: 6206 - protein, 21 aa, Artificial Sequence
  Description of Artificial Sequence: Synthetic peptide
  MOD_RES (4)..(4): phosphorylated serine
GRLSPVPVPKFFRKNWLRLTW

SEQ ID NO: 6207 - protein, 21 aa, Artificial Sequence
  Description of Artificial Sequence: Synthetic peptide
  MOD_RES (4)..(4): phosphorylated serine
GRLSPVPVPLFFRKNWLRLTW

SEQ ID NO: 6208 - protein, 21 aa, Artificial Sequence
  Description of Artificial Sequence: Synthetic peptide
  MOD_RES (4)..(4): phosphorylated serine
GRLSPVPVPMFFRKNWLRLTW

SEQ ID NO: 6209 - protein, 21 aa, Artificial Sequence
  Description of Artificial Sequence: Synthetic peptide
  MOD_RES (4)..(4): phosphorylated serine
GRLSPVPVPRFFRKNWLRLTW

SEQ ID NO: 6210 - protein, 21 aa, Artificial Sequence
  Description of Artificial Sequence: Synthetic peptide
  MOD_RES (4)..(4): phosphorylated serine
GRLSPVPVPYFFRKNWLRLTW

SEQ ID NO: 6211 - protein, 20 aa, Artificial Sequence
  Description of Artificial Sequence: Synthetic peptide
  MOD_RES (4)..(4): phosphorylated serine
GRQSPSFKLFFRKNWLRLTW

SEQ ID NO: 6212 - protein, 20 aa, Artificial Sequence
  Description of Artificial Sequence: Synthetic peptide
  MOD_RES (3)..(3): phosphorylated serine
GRSSPPPGYFFRKNWLRLTW

SEQ ID NO: 6213 - protein, 22 aa, Artificial Sequence
  Description of Artificial Sequence: Synthetic peptide
  MOD_RES (4)..(4): phosphorylated serine
GRSSTASLVKFFFRKNWLRLTW

SEQ ID NO: 6214 - protein, 22 aa, Artificial Sequence
  Description of Artificial Sequence: Synthetic peptide
  MOD_RES (4)..(4): phosphorylated serine
GRSSTASLVKKFFRKNWLRLTW

SEQ ID NO: 6215 - protein, 23 aa, Artificial Sequence
  Description of Artificial Sequence: Synthetic peptide
  MOD_RES (4)..(4): phosphorylated serine
GRSSTASLVKKKFFRKNWLRLTW

SEQ ID NO: 6216 - protein, 22 aa, Artificial Sequence
  Description of Artificial Sequence: Synthetic peptide
  MOD_RES (4)..(4): phosphorylated serine
GRSSTASLVKLFFRKNWLRLTW

SEQ ID NO: 6217 - protein, 22 aa, Artificial Sequence
  Description of Artificial Sequence: Synthetic peptide
  MOD_RES (4)..(4): phosphorylated serine
GRSSTASLVKMFFRKNWLRLTW

SEQ ID NO: 6218 - protein, 22 aa, Artificial Sequence
  Description of Artificial Sequence: Synthetic peptide
  MOD_RES (4)..(4): phosphorylated serine
GRSSTASLVKRFFRKNWLRLTW

SEQ ID NO: 6219 - protein, 22 aa, Artificial Sequence
  Description of Artificial Sequence: Synthetic peptide
  MOD_RES (4)..(4): phosphorylated serine
GRSSTASLVKYFFRKNWLRLTW

SEQ ID NO: 6220 - protein, 19 aa, Artificial Sequence
  Description of Artificial Sequence: Synthetic peptide
  MOD_RES (3)..(3): phosphorylated threonine
GRTGLPDLFFRKNWLRLTW

SEQ ID NO: 6221 - protein, 39 aa, Artificial Sequence
  Description of Artificial Sequence: Synthetic polypeptide
  MOD_RES (21)..(21): phosphorylated serine
GSALGGGGAGLSGRASGGAQSPLRYLHVFFRKNWLRLTW

SEQ ID NO: 6222 - protein, 22 aa, Artificial Sequence
  Description of Artificial Sequence: Synthetic peptide
  MOD_RES (4)..(4): phosphorylated serine
GSDSSDDGKKYFFRKNWLRLTW

SEQ ID NO: 6223 - protein, 22 aa, Artificial Sequence
  Description of Artificial Sequence: Synthetic peptide
  MOD_RES (4)..(4): phosphorylated serine
GSESSDDGKKYFFRKNWLRLTW

SEQ ID NO: 6224 - protein, 20 aa, Artificial Sequence
  Description of Artificial Sequence: Synthetic peptide
  MOD_RES (2)..(2): phosphorylated serine
GSPHYFSPFFFRKNWLRLTW

SEQ ID NO: 6225 - protein, 23 aa, Artificial Sequence
  Description of Artificial Sequence: Synthetic peptide
  MOD_RES (2)..(2): phosphorylated serine
GSPHYFSPFRPYFFRKNWLRLTW

SEQ ID NO: 6226 - protein, 28 aa, Artificial Sequence
  Description of Artificial Sequence: Synthetic peptide
  MOD_RES (2)..(2): phosphorylated serine
GSPTMVEKGLEPGVFTLFFRKNWLRLTW

SEQ ID NO: 6227 - protein, 21 aa, Artificial Sequence
  Description of Artificial Sequence: Synthetic peptide
  MOD_RES (2)..(2): phosphorylated serine
GSQLAVMMYLFFRKNWLRLTW

SEQ ID NO: 6228 - protein, 22 aa, Artificial Sequence
  Description of Artificial Sequence: Synthetic peptide
  MOD_RES (4)..(4): phosphorylated serine
GTDSSDDGKKYFFRKNWLRLTW

SEQ ID NO: 6229 - protein, 22 aa, Artificial Sequence
  Description of Artificial Sequence: Synthetic peptide
  MOD_RES (4)..(4): phosphorylated serine
GTESSDDGKKYFFRKNWLRLTW

SEQ ID NO: 6230 - protein, 22 aa, Artificial Sequence
  Description of Artificial Sequence: Synthetic peptide
  MOD_RES (7)..(7): phosphorylated serine
GTIRSRSFIFKFFRKNWLRLTW

SEQ ID NO: 6231 - protein, 22 aa, Artificial Sequence
  Description of Artificial Sequence: Synthetic peptide
  MOD_RES (7)..(7): phosphorylated serine
GTIRSRSFIFYFFRKNWLRLTW

SEQ ID NO: 6232 - protein, 17 aa, Artificial Sequence
  Description of Artificial Sequence: Synthetic peptide
  MOD_RES (2)..(2): phosphorylated threonine
GTLPKYFFRKNWLRLTW

SEQ ID NO: 6233 - protein, 24 aa, Artificial Sequence
  Description of Artificial Sequence: Synthetic peptide
  MOD_RES (2)..(2): phosphorylated threonine
GTLRRSDSQQAVKFFRKNWLRLTW

SEQ ID NO: 6234 - protein, 25 aa, Artificial Sequence
  Description of Artificial Sequence: Synthetic peptide
  MOD_RES (2)..(2): phosphorylated threonine
GTLRRSDSQQAVKSFFRKNWLRLTW

SEQ ID NO: 6235 - protein, 27 aa, Artificial Sequence
  Description of Artificial Sequence: Synthetic peptide
  MOD_RES (2)..(2): phosphorylated threonine
GTLRRSDSQQAVKSPPFFRKNWLRLTW

SEQ ID NO: 6236 - protein, 20 aa, Artificial Sequence
  Description of Artificial Sequence: Synthetic peptide
  MOD_RES (4)..(4): phosphorylated serine
GVASPTITVFFRKNWLRLTW

SEQ ID NO: 6237 - protein, 20 aa, Artificial Sequence
  Description of Artificial Sequence: Synthetic peptide
  MOD_RES (4)..(4): phosphorylated serine
GVVSPTFELFFRKNWLRLTW

SEQ ID NO: 6238 - protein, 19 aa, Artificial Sequence
  Description of Artificial Sequence: Synthetic peptide
  MOD_RES (7)..(7): phosphorylated serine
HEKKAYSFFFRKNWLRLTW

SEQ ID NO: 6239 - protein, 30 aa, Artificial Sequence
  Description of Artificial Sequence: Synthetic polypeptide
  MOD_RES (17)..(17): phosphorylated serine
  MOD_RES (18)..(18): phosphorylated serine
HKGEIRGASTPFQFRASSPFFRKNWLRLTW

SEQ ID NO: 6240 - protein, 20 aa, Artificial Sequence
  Description of Artificial Sequence: Synthetic peptide
  MOD_RES (4)..(4): phosphorylated serine
HLHSPQHKLFFRKNWLRLTW

SEQ ID NO: 6241 - protein, 19 aa, Artificial Sequence
  Description of Artificial Sequence: Synthetic peptide
  MOD_RES (7)..(7): phosphorylated serine
HPKRSVSLFFRKNWLRLTW

SEQ ID NO: 6242 - protein, 19 aa, Artificial Sequence
  Description of Artificial Sequence: Synthetic peptide
  MOD_RES (4)..(4): phosphorylated serine
HPRSPNVLFFRKNWLRLTW

SEQ ID NO: 6243 - protein, 21 aa, Artificial Sequence
  Description of Artificial Sequence: Synthetic peptide
  MOD_RES (4)..(4): phosphorylated serine
HPRSPNVLSFFFRKNWLRLTW

SEQ ID NO: 6244 - protein, 21 aa, Artificial Sequence
  Description of Artificial Sequence: Synthetic peptide
  MOD_RES (4)..(4): phosphorylated serine
HPRSPNVLSLFFRKNWLRLTW

SEQ ID NO: 6245 - protein, 21 aa, Artificial Sequence
  Description of Artificial Sequence: Synthetic peptide
  MOD_RES (4)..(4): phosphorylated serine
HPRSPNVLSMFFRKNWLRLTW

SEQ ID NO: 6246 - protein, 21 aa, Artificial Sequence
  Description of Artificial Sequence: Synthetic peptide
  MOD_RES (4)..(4): phosphorylated serine
HPRSPNVLSVFFRKNWLRLTW

SEQ ID NO: 6247 - protein, 20 aa, Artificial Sequence
  Description of Artificial Sequence: Synthetic peptide
  MOD_RES (4)..(4): phosphorylated serine
HPRSPTPTFFFRKNWLRLTW

SEQ ID NO: 6248 - protein, 20 aa, Artificial Sequence
  Description of Artificial Sequence: Synthetic peptide
  MOD_RES (6)..(6): phosphorylated threonine
HPRSPTPTFFFRKNWLRLTW

SEQ ID NO: 6249 - protein, 20 aa, Artificial Sequence
  Description of Artificial Sequence: Synthetic peptide
  MOD_RES (4)..(4): phosphorylated serine
HPRSPTPTLFFRKNWLRLTW

SEQ ID NO: 6250 - protein, 20 aa, Artificial Sequence
  Description of Artificial Sequence: Synthetic peptide
  MOD_RES (6)..(6): phosphorylated threonine
HPRSPTPTLFFRKNWLRLTW

SEQ ID NO: 6251 - protein, 20 aa, Artificial Sequence
  Description of Artificial Sequence: Synthetic peptide
  MOD_RES (4)..(4): phosphorylated serine
HPRSPTPTMFFRKNWLRLTW

SEQ ID NO: 6252 - protein, 20 aa, Artificial Sequence
  Description of Artificial Sequence: Synthetic peptide
  MOD_RES (6)..(6): phosphorylated threonine
HPRSPTPTMFFRKNWLRLTW

SEQ ID NO: 6253 - protein, 20 aa, Artificial Sequence
  Description of Artificial Sequence: Synthetic peptide
  MOD_RES (6)..(6): phosphorylated threonine
HPRSPTPTVFFRKNWLRLTW

SEQ ID NO: 6254 - protein, 20 aa, Artificial Sequence
  Description of Artificial Sequence: Synthetic peptide
  MOD_RES (3)..(3): phosphorylated serine
HPSSPTPTVFFRKNWLRLTW

SEQ ID NO: 6255 - protein, 21 aa, Artificial Sequence
  Description of Artificial Sequence: Synthetic peptide
  MOD_RES (4)..(4): phosphorylated serine
HRLSPVKGEFFFRKNWLRLTW

SEQ ID NO: 6256 - protein, 21 aa, Artificial Sequence
  Description of Artificial Sequence: Synthetic peptide
  MOD_RES (4)..(4): phosphorylated serine
HRLSPVKGEKFFRKNWLRLTW

SEQ ID NO: 6257 - protein, 21 aa, Artificial Sequence
  Description of Artificial Sequence: Synthetic peptide
  MOD_RES (4)..(4): phosphorylated serine
HRLSPVKGERFFRKNWLRLTW

SEQ ID NO: 6258 - protein, 21 aa, Artificial Sequence
  Description of Artificial Sequence: Synthetic peptide
  MOD_RES (4)..(4): phosphorylated serine
HRLSPVKGEYFFRKNWLRLTW

SEQ ID NO: 6259 - protein, 20 aa, Artificial Sequence
  Description of Artificial Sequence: Synthetic peptide
  MOD_RES (4)..(4): phosphorylated serine
HRNSMKVFLFFRKNWLRLTW

SEQ ID NO: 6260 - protein, 22 aa, Artificial Sequence
  Description of Artificial Sequence: Synthetic peptide
  MOD_RES (4)..(4): phosphorylated serine
HRNSNPVIAEFFFRKNWLRLTW

SEQ ID NO: 6261 - protein, 22 aa, Artificial Sequence
  Description of Artificial Sequence: Synthetic peptide
  MOD_RES (4)..(4): phosphorylated serine
HRNSNPVIAEKFFRKNWLRLTW

SEQ ID NO: 6262 - protein, 22 aa, Artificial Sequence
  Description of Artificial Sequence: Synthetic peptide
  MOD_RES (4)..(4): phosphorylated serine
HRNSNPVIAELFFRKNWLRLTW

SEQ ID NO: 6263 - protein, 22 aa, Artificial Sequence
  Description of Artificial Sequence: Synthetic peptide
  MOD_RES (4)..(4): phosphorylated serine
HRNSNPVIAERFFRKNWLRLTW

SEQ ID NO: 6264 - protein, 22 aa, Artificial Sequence
  Description of Artificial Sequence: Synthetic peptide
  MOD_RES (4)..(4): phosphorylated serine
HRNSNPVIAEYFFRKNWLRLTW

SEQ ID NO: 6265 - protein, 20 aa, Artificial Sequence
  Description of Artificial Sequence: Synthetic peptide
  MOD_RES (4)..(4): phosphorylated serine
HRYSTPHAFFFRKNWLRLTW

SEQ ID NO: 6266 - protein, 21 aa, Artificial Sequence
  Description of Artificial Sequence: Synthetic peptide
  MOD_RES (4)..(4): phosphorylated serine
HTASPTGMMKFFRKNWLRLTW

SEQ ID NO: 6267 - protein, 20 aa, Artificial Sequence
  Description of Artificial Sequence: Synthetic peptide
  MOD_RES (4)..(4): phosphorylated threonine
HVYTPSTTKFFRKNWLRLTW

SEQ ID NO: 6268 - protein, 26 aa, Artificial Sequence
  Description of Artificial Sequence: Synthetic peptide
  MOD_RES (5)..(5): phosphorylated tyrosine
IEKIYIMKADTVIVGFFRKNWLRLTW

SEQ ID NO: 6269 - protein, 20 aa, Artificial Sequence
  Description of Artificial Sequence: Synthetic peptide
  MOD_RES (4)..(4): phosphorylated threonine
IIETPHKEIFFRKNWLRLTW

SEQ ID NO: 6270 - protein, 20 aa, Artificial Sequence
  Description of Artificial Sequence: Synthetic peptide
  MOD_RES (4)..(4): phosphorylated threonine
IIETPHKEYFFRKNWLRLTW

SEQ ID NO: 6271 - protein, 20 aa, Artificial Sequence
  Description of Artificial Sequence: Synthetic peptide
  MOD_RES (4)..(4): phosphorylated serine
IISSPLKGYFFRKNWLRLTW

SEQ ID NO: 6272 - protein, 20 aa, Artificial Sequence
  Description of Artificial Sequence: Synthetic peptide
  MOD_RES (4)..(4): phosphorylated serine
IISSPLTGKFFRKNWLRLTW

SEQ ID NO: 6273 - protein, 20 aa, Artificial Sequence
  Description of Artificial Sequence: Synthetic peptide
  MOD_RES (5)..(5): phosphorylated threonine
ILDRTPEKLFFRKNWLRLTW

SEQ ID NO: 6274 - protein, 20 aa, Artificial Sequence
  Description of Artificial Sequence: Synthetic peptide
  MOD_RES (5)..(5): phosphorylated threonine
ILDRTPEKVFFRKNWLRLTW

SEQ ID NO: 6275 - protein, 20 aa, Artificial Sequence
  Description of Artificial Sequence: Synthetic peptide
  MOD_RES (4)..(4): phosphorylated serine
ILDSGIYRIFFRKNWLRLTW

SEQ ID NO: 6276 - protein, 20 aa, Artificial Sequence
  Description of Artificial Sequence: Synthetic peptide
  MOD_RES (4)..(4): phosphorylated serine
ILDSGIYRVFFRKNWLRLTW

SEQ ID NO: 6277 - protein, 19 aa, Artificial Sequence
  Description of Artificial Sequence: Synthetic peptide
  MOD_RES (7)..(7): phosphorylated serine
ILKPRRSLFFRKNWLRLTW

SEQ ID NO: 6278 - protein, 21 aa, Artificial Sequence
  Description of Artificial Sequence: Synthetic peptide
  MOD_RES (4)..(4): phosphorylated serine
ILKSPEIQRAFFRKNWLRLTW

SEQ ID NO: 6279 - protein, 21 aa, Artificial Sequence
  Description of Artificial Sequence: Synthetic peptide
  MOD_RES (4)..(4): phosphorylated serine
ILKSPEIQRVFFRKNWLRLTW

SEQ ID NO: 6280 - protein, 20 aa, Artificial Sequence
  Description of Artificial Sequence: Synthetic peptide
  MOD_RES (4)..(4): phosphorylated threonine
ILQTPQFQMFFRKNWLRLTW

SEQ ID NO: 6281 - protein, 20 aa, Artificial Sequence
  Description of Artificial Sequence: Synthetic peptide
  MOD_RES (5)..(5): phosphorylated serine
ILQVSIPSLFFRKNWLRLTW

SEQ ID NO: 6282 - protein, 20 aa, Artificial Sequence
  Description of Artificial Sequence: Synthetic peptide
  MOD_RES (5)..(5): phosphorylated threonine
IMDRTPEKLFFRKNWLRLTW

SEQ ID NO: 6283 - protein, 20 aa, Artificial Sequence
  Description of Artificial Sequence: Synthetic peptide
  MOD_RES (5)..(5): phosphorylated threonine
IMDRTPEKVFFRKNWLRLTW

SEQ ID NO: 6284 - protein, 20 aa, Artificial Sequence
  Description of Artificial Sequence: Synthetic peptide
  MOD_RES (4)..(4): phosphorylated serine
IMDSGIYRIFFRKNWLRLTW

SEQ ID NO: 6285 - protein, 20 aa, Artificial Sequence
  Description of Artificial Sequence: Synthetic peptide
  MOD_RES (4)..(4): phosphorylated serine
IMDSGIYRVFFRKNWLRLTW

SEQ ID NO: 6286 - protein, 21 aa, Artificial Sequence
  Description of Artificial Sequence: Synthetic peptide
  MOD_RES (4)..(4): phosphorylated serine
IMKSPEIQRAFFRKNWLRLTW

SEQ ID NO: 6287 - protein, 21 aa, Artificial Sequence
  Description of Artificial Sequence: Synthetic peptide
  MOD_RES (4)..(4): phosphorylated serine
IMKSPEIQRVFFRKNWLRLTW

SEQ ID NO: 6288 - protein, 20 aa, Artificial Sequence
  Description of Artificial Sequence: Synthetic peptide
  MOD_RES (8)..(8): phosphorylated serine
INKERRSSLFFRKNWLRLTW

SEQ ID NO: 6289 - protein, 21 aa, Artificial Sequence
  Description of Artificial Sequence: Synthetic peptide
IPVGSSHNSLFFRKNWLRLTW

SEQ ID NO: 6290 - protein, 21 aa, Artificial Sequence
  Description of Artificial Sequence: Synthetic peptide
  MOD_RES (4)..(4): phosphorylated serine
IQFSPPFPGAFFRKNWLRLTW

SEQ ID NO: 6291 - protein, 19 aa, Artificial Sequence
  Description of Artificial Sequence: Synthetic peptide
  MOD_RES (5)..(5): phosphorylated threonine
ISDGTLKYFFRKNWLRLTW

SEQ ID NO: 6292 - protein, 20 aa, Artificial Sequence
  Description of Artificial Sequence: Synthetic peptide
  MOD_RES (5)..(5): phosphorylated threonine
ISDGTPLKYFFRKNWLRLTW

SEQ ID NO: 6293 - protein, 20 aa, Artificial Sequence
  Description of Artificial Sequence: Synthetic peptide
  MOD_RES (7)..(7): phosphorylated threonine
ISDSAHTDYFFRKNWLRLTW

SEQ ID NO: 6294 - protein, 20 aa, Artificial Sequence
  Description of Artificial Sequence: Synthetic peptide
  MOD_RES (4)..(4): phosphorylated serine
ISDSMHSLYFFRKNWLRLTW

SEQ ID NO: 6295 - protein, 20 aa, Artificial Sequence
  Description of Artificial Sequence: Synthetic peptide
  MOD_RES (4)..(4): phosphorylated threonine
ISDTPHKEIFFRKNWLRLTW

SEQ ID NO: 6296 - protein, 20 aa, Artificial Sequence
  Description of Artificial Sequence: Synthetic peptide
  MOD_RES (4)..(4): phosphorylated threonine
ISDTPHKEYFFRKNWLRLTW

SEQ ID NO: 6297 - protein, 19 aa, Artificial Sequence
  Description of Artificial Sequence: Synthetic peptide
  MOD_RES (5)..(5): phosphorylated threonine
ISEGTLKYFFRKNWLRLTW

SEQ ID NO: 6298 - protein, 20 aa, Artificial Sequence
  Description of Artificial Sequence: Synthetic peptide
  MOD_RES (5)..(5): phosphorylated threonine
ISEGTPLKYFFRKNWLRLTW

SEQ ID NO: 6299 - protein, 20 aa, Artificial Sequence
  Description of Artificial Sequence: Synthetic peptide
  MOD_RES (7)..(7): phosphorylated threonine
ISESAHTDYFFRKNWLRLTW

SEQ ID NO: 6300 - protein, 20 aa, Artificial Sequence
  Description of Artificial Sequence: Synthetic peptide
  MOD_RES (4)..(4): phosphorylated serine
ISESMHSLYFFRKNWLRLTW

SEQ ID NO: 6301 - protein, 20 aa, Artificial Sequence
  Description of Artificial Sequence: Synthetic peptide
  MOD_RES (4)..(4): phosphorylated threonine
ISETPHKEIFFRKNWLRLTW

SEQ ID NO: 6302 - protein, 20 aa, Artificial Sequence
  Description of Artificial Sequence: Synthetic peptide
  MOD_RES (4)..(4): phosphorylated threonine
ISETPHKEYFFRKNWLRLTW

SEQ ID NO: 6303 - protein, 20 aa, Artificial Sequence
  Description of Artificial Sequence: Synthetic peptide
  MOD_RES (7)..(7): phosphorylated threonine
ISFSAHTDYFFRKNWLRLTW

SEQ ID NO: 6304 - protein, 20 aa, Artificial Sequence
  Description of Artificial Sequence: Synthetic peptide
  MOD_RES (4)..(4): phosphorylated serine
ISSSMHSLYFFRKNWLRLTW

SEQ ID NO: 6305 - protein, 19 aa, Artificial Sequence
  Description of Artificial Sequence: Synthetic peptide
  MOD_RES (3)..(3): phosphorylated threonine
ISTDRDPLFFRKNWLRLTW

SEQ ID NO: 6306 - protein, 19 aa, Artificial Sequence
  Description of Artificial Sequence: Synthetic peptide
  MOD_RES (3)..(3): phosphorylated threonine
ISTDRDPYFFRKNWLRLTW

SEQ ID NO: 6307 - protein, 19 aa, Artificial Sequence
  Description of Artificial Sequence: Synthetic peptide
  MOD_RES (5)..(5): phosphorylated threonine
ITDGTLKYFFRKNWLRLTW

SEQ ID NO: 6308 - protein, 20 aa, Artificial Sequence
  Description of Artificial Sequence: Synthetic peptide
  MOD_RES (5)..(5): phosphorylated threonine
ITDGTPLKYFFRKNWLRLTW

SEQ ID NO: 6309 - protein, 20 aa, Artificial Sequence
  Description of Artificial Sequence: Synthetic peptide
  MOD_RES (7)..(7): phosphorylated threonine
ITDSAHTDYFFRKNWLRLTW

SEQ ID NO: 6310 - protein, 20 aa, Artificial Sequence
  Description of Artificial Sequence: Synthetic peptide
  MOD_RES (4)..(4): phosphorylated serine
ITDSMHSLYFFRKNWLRLTW

SEQ ID NO: 6311 - protein, 20 aa, Artificial Sequence
  Description of Artificial Sequence: Synthetic peptide
  MOD_RES (4)..(4): phosphorylated threonine
ITDTPHKEIFFRKNWLRLTW

SEQ ID NO: 6312 - protein, 20 aa, Artificial Sequence
  Description of Artificial Sequence: Synthetic peptide
  MOD_RES (4)..(4): phosphorylated threonine
ITDTPHKEYFFRKNWLRLTW

SEQ ID NO: 6313 - protein, 19 aa, Artificial Sequence
  Description of Artificial Sequence: Synthetic peptide
  MOD_RES (5)..(5): phosphorylated threonine
ITEGTLKYFFRKNWLRLTW

SEQ ID NO: 6314 - protein, 20 aa, Artificial Sequence
  Description of Artificial Sequence: Synthetic peptide
  MOD_RES (5)..(5): phosphorylated threonine
ITEGTPLKYFFRKNWLRLTW

SEQ ID NO: 6315 - protein, 20 aa, Artificial Sequence
  Description of Artificial Sequence: Synthetic peptide
  MOD_RES (7)..(7): phosphorylated threonine
ITESAHTDYFFRKNWLRLTW

SEQ ID NO: 6316 - protein, 20 aa, Artificial Sequence
  Description of Artificial Sequence: Synthetic peptide
  MOD_RES (4)..(4): phosphorylated serine
ITESMHSLYFFRKNWLRLTW

SEQ ID NO: 6317 - protein, 20 aa, Artificial Sequence
  Description of Artificial Sequence: Synthetic peptide
  MOD_RES (4)..(4): phosphorylated threonine
ITETPHKEIFFRKNWLRLTW

SEQ ID NO: 6318 - protein, 20 aa, Artificial Sequence
  Description of Artificial Sequence: Synthetic peptide
  MOD_RES (4)..(4): phosphorylated threonine
ITETPHKEYFFRKNWLRLTW

SEQ ID NO: 6319 - protein, 19 aa, Artificial Sequence
  Description of Artificial Sequence: Synthetic peptide
  MOD_RES (5)..(5): phosphorylated threonine
ITQGTLKYFFRKNWLRLTW

SEQ ID NO: 6320 - protein, 20 aa, Artificial Sequence
  Description of Artificial Sequence: Synthetic peptide
  MOD_RES (5)..(5): phosphorylated threonine
ITQGTPLKKFFRKNWLRLTW

SEQ ID NO: 6321 - protein, 20 aa, Artificial Sequence
  Description of Artificial Sequence: Synthetic peptide
  MOD_RES (5)..(5): phosphorylated threonine
ITQGTPLKYFFRKNWLRLTW

SEQ ID NO: 6322 - protein, 19 aa, Artificial Sequence
  Description of Artificial Sequence: Synthetic peptide
  MOD_RES (3)..(3): phosphorylated threonine
ITTDRDPLFFRKNWLRLTW

SEQ ID NO: 6323 - protein, 19 aa, Artificial Sequence
  Description of Artificial Sequence: Synthetic peptide
  MOD_RES (3)..(3): phosphorylated threonine
ITTDRDPYFFRKNWLRLTW

SEQ ID NO: 6324 - protein, 22 aa, Artificial Sequence
  Description of Artificial Sequence: Synthetic peptide
  MOD_RES (4)..(4): phosphorylated serine
IVLSDSEVIQLFFRKNWLRLTW

SEQ ID NO: 6325 - protein, 18 aa, Artificial Sequence
  Description of Artificial Sequence: Synthetic peptide
  MOD_RES (4)..(4): phosphorylated tyrosine
IVRYHQLFFRKNWLRLTW

SEQ ID NO: 6326 - protein, 19 aa, Artificial Sequence
  Description of Artificial Sequence: Synthetic peptide
  MOD_RES (3)..(3): phosphorylated threonine
IVTDRDPLFFRKNWLRLTW

SEQ ID NO: 6327 - protein, 19 aa, Artificial Sequence
  Description of Artificial Sequence: Synthetic peptide
  MOD_RES (3)..(3): phosphorylated threonine
IVTDRDPYFFRKNWLRLTW

SEQ ID NO: 6328 - protein, 20 aa, Artificial Sequence
  Description of Artificial Sequence: Synthetic peptide
  MOD_RES (4)..(4): phosphorylated tyrosine
IYQYIQSRFFFRKNWLRLTW

SEQ ID NO: 6329 - protein, 18 aa, Artificial Sequence
  Description of Artificial Sequence: Synthetic peptide
  MOD_RES (4)..(4): phosphorylated serine
KAFSPVRFFRKNWLRLTW

SEQ ID NO: 6330 - protein, 20 aa, Artificial Sequence
  Description of Artificial Sequence: Synthetic peptide
  MOD_RES (4)..(4): phosphorylated serine
KAFSPVRSVFFRKNWLRLTW

SEQ ID NO: 6331 - protein, 20 aa, Artificial Sequence
  Description of Artificial Sequence: Synthetic peptide
  MOD_RES (4)..(4): phosphorylated serine
KAKSPAPGLFFRKNWLRLTW

SEQ ID NO: 6332 - protein, 20 aa, Artificial Sequence
  Description of Artificial Sequence: Synthetic peptide
  MOD_RES (4)..(4): phosphorylated serine
KAKSPAPGVFFRKNWLRLTW

SEQ ID NO: 6333 - protein, 20 aa, Artificial Sequence
  Description of Artificial Sequence: Synthetic peptide
  MOD_RES (4)..(4): phosphorylated serine
KARSPGRAFFFRKNWLRLTW

SEQ ID NO: 6334 - protein, 20 aa, Artificial Sequence
  Description of Artificial Sequence: Synthetic peptide
  MOD_RES (4)..(4): phosphorylated serine
KARSPGRALFFRKNWLRLTW

SEQ ID NO: 6335 - protein, 20 aa, Artificial Sequence
  Description of Artificial Sequence: Synthetic peptide
  MOD_RES (4)..(4): phosphorylated serine
KARSPGRAMFFRKNWLRLTW

SEQ ID NO: 6336 - protein, 20 aa, Artificial Sequence
  Description of Artificial Sequence: Synthetic peptide
  MOD_RES (4)..(4): phosphorylated serine
KARSPGRAVFFRKNWLRLTW

SEQ ID NO: 6337 - protein, 20 aa, Artificial Sequence
  Description of Artificial Sequence: Synthetic peptide
  MOD_RES (8)..(8): phosphorylated serine
KASPKRLSLFFRKNWLRLTW

SEQ ID NO: 6338 - protein, 20 aa, Artificial Sequence
  Description of Artificial Sequence: Synthetic peptide
  MOD_RES (4)..(4): phosphorylated serine
  MISC_FEATURE (8)..(8): present in a cysteine-cysteine disulfide bond
KAVSLFLCYFFRKNWLRLTW

SEQ ID NO: 6339 - protein, 20 aa, Artificial Sequence
  Description of Artificial Sequence: Synthetic peptide
  MOD_RES (4)..(4): phosphorylated serine
KAVSLFLCYFFRKNWLRLTW

SEQ ID NO: 6340 - protein, 35 aa, Artificial Sequence
  Description of Artificial Sequence: Synthetic polypeptide
  MOD_RES (10)..(10): phosphorylated serine
KEGEEPTVYSDEEEPKDESARKNDFFRKNWLRLTW

SEQ ID NO: 6341 - protein, 20 aa, Artificial Sequence
  Description of Artificial Sequence: Synthetic peptide
  MOD_RES (4)..(4): phosphorylated serine
KEKSPFRETFFRKNWLRLTW

SEQ ID NO: 6342 - protein, 20 aa, Artificial Sequence
  Description of Artificial Sequence: Synthetic peptide
  MOD_RES (8)..(8): phosphorylated serine
KELARQISFFFRKNWLRLTW

SEQ ID NO: 6343 - protein, 20 aa, Artificial Sequence
  Description of Artificial Sequence: Synthetic peptide
  MOD_RES (4)..(4): phosphorylated serine
KEMSPTRQFFFRKNWLRLTW

SEQ ID NO: 6344 - protein, 20 aa, Artificial Sequence
  Description of Artificial Sequence: Synthetic peptide
  MOD_RES (3)..(3): oxidized methionine
  MOD_RES (4)..(4): phosphorylated serine
KEMSPTRQLFFRKNWLRLTW

SEQ ID NO: 6345 - protein, 20 aa, Artificial Sequence
  Description of Artificial Sequence: Synthetic peptide
  MOD_RES (4)..(4): phosphorylated serine
KEMSPTRQLFFRKNWLRLTW

SEQ ID NO: 6346 - protein, 20 aa, Artificial Sequence
  Description of Artificial Sequence: Synthetic peptide
  MOD_RES (4)..(4): phosphorylated serine
KEMSPTRQWFFRKNWLRLTW

SEQ ID NO: 6347 - protein, 20 aa, Artificial Sequence
  Description of Artificial Sequence: Synthetic peptide
  MOD_RES (4)..(4): phosphorylated serine
KEMSPTRQYFFRKNWLRLTW

SEQ ID NO: 6348 - protein, 22 aa, Artificial Sequence
  Description of Artificial Sequence: Synthetic peptide
  MOD_RES (4)..(4): phosphorylated serine
KESSPLSSRKIFFRKNWLRLTW

SEQ ID NO: 6349 - protein, 20 aa, Artificial Sequence
  Description of Artificial Sequence: Synthetic peptide
  MOD_RES (8)..(8): phosphorylated serine
KFRPPPLSLFFRKNWLRLTW

SEQ ID NO: 6350 - protein, 22 aa, Artificial Sequence
  Description of Artificial Sequence: Synthetic peptide
  MOD_RES (4)..(4): phosphorylated serine
KGISSSSLKEKFFRKNWLRLTW

SEQ ID NO: 6351 - protein, 20 aa, Artificial Sequence
  Description of Artificial Sequence: Synthetic peptide
  MOD_RES (4)..(4): phosphorylated serine
KIASEIAQLFFRKNWLRLTW

SEQ ID NO: 6352 - protein, 21 aa, Artificial Sequence
  Description of Artificial Sequence: Synthetic peptide
  MOD_RES (6)..(6): phosphorylated serine
KIDIVSSQKVFFRKNWLRLTW

SEQ ID NO: 6353 - protein, 21 aa, Artificial Sequence
  Description of Artificial Sequence: Synthetic peptide
  MOD_RES (4)..(4): phosphorylated serine
KIDSPTKVKKFFRKNWLRLTW

SEQ ID NO: 6354 - protein, 27 aa, Artificial Sequence
  Description of Artificial Sequence: Synthetic peptide
  MOD_RES (6)..(6): phosphorylated tyrosine
KIEKIYIMKADTVIVGFFRKNWLRLTW

SEQ ID NO: 6355 - protein, 21 aa, Artificial Sequence
  Description of Artificial Sequence: Synthetic peptide
  MOD_RES (4)..(4): phosphorylated serine
KIESLENLYLFFRKNWLRLTW

SEQ ID NO: 6356 - protein, 20 aa, Artificial Sequence
  Description of Artificial Sequence: Synthetic peptide
  MOD_RES (4)..(4): phosphorylated serine
KIFSGVFVKFFRKNWLRLTW

SEQ ID NO: 6357 - protein, 21 aa, Artificial Sequence
  Description of Artificial Sequence: Synthetic peptide
  MOD_RES (4)..(4): phosphorylated serine
KIFSGVFVKVFFRKNWLRLTW

SEQ ID NO: 6358 - protein, 20 aa, Artificial Sequence
  Description of Artificial Sequence: Synthetic peptide
  MOD_RES (4)..(4): phosphorylated serine
KIFSKQQGKFFRKNWLRLTW

SEQ ID NO: 6359 - protein, 20 aa, Artificial Sequence
  Description of Artificial Sequence: Synthetic peptide
  MOD_RES (4)..(4): phosphorylated serine
KIFSKQQGYFFRKNWLRLTW

SEQ ID NO: 6360 - protein, 20 aa, Artificial Sequence
  Description of Artificial Sequence: Synthetic peptide
  MOD_RES (4)..(4): phosphorylated serine
KIGSIIFQVFFRKNWLRLTW

SEQ ID NO: 6361 - protein, 20 aa, Artificial Sequence
  Description of Artificial Sequence: Synthetic peptide
  MOD_RES (4)..(4): phosphorylated serine
KIKSFEVVFFFRKNWLRLTW

SEQ ID NO: 6362 - protein, 21 aa, Artificial Sequence
  Description of Artificial Sequence: Synthetic peptide
  MOD_RES (5)..(5): phosphorylated serine
KIRSSPREAKFFRKNWLRLTW

SEQ ID NO: 6363 - protein, 21 aa, Artificial Sequence
  Description of Artificial Sequence: Synthetic peptide
  MOD_RES (5)..(5): phosphorylated serine
KIRSSPREAYFFRKNWLRLTW

SEQ ID NO: 6364 - protein, 20 aa, Artificial Sequence
  Description of Artificial Sequence: Synthetic peptide
  MOD_RES (5)..(5): phosphorylated serine
KIRTSPTFRFFRKNWLRLTW

SEQ ID NO: 6365 - protein, 20 aa, Artificial Sequence
  Description of Artificial Sequence: Synthetic peptide
  MOD_RES (5)..(5): phosphorylated serine
KIRTSPTFYFFRKNWLRLTW

SEQ ID NO: 6366 - protein, 22 aa, Artificial Sequence
  Description of Artificial Sequence: Synthetic peptide
  MOD_RES (4)..(4): phosphorylated serine
KLASLEREASVFFRKNWLRLTW

SEQ ID NO: 6367 - protein, 20 aa, Artificial Sequence
  Description of Artificial Sequence: Synthetic peptide
  MOD_RES (4)..(4): phosphorylated serine
KLASLLHQVFFRKNWLRLTW

SEQ ID NO: 6368 - protein, 22 aa, Artificial Sequence
  Description of Artificial Sequence: Synthetic peptide
  MOD_RES (4)..(4): phosphorylated serine
KLASPEKLAGLFFRKNWLRLTW

SEQ ID NO: 6369 - protein, 21 aa, Artificial Sequence
  Description of Artificial Sequence: Synthetic peptide
  MOD_RES (4)..(4): phosphorylated serine
KLASPELERLFFRKNWLRLTW

SEQ ID NO: 6370 - protein, 21 aa, Artificial Sequence
  Description of Artificial Sequence: Synthetic peptide
  MOD_RES (4)..(4): phosphorylated serine
KLASPELERVFFRKNWLRLTW

SEQ ID NO: 6371 - protein, 21 aa, Artificial Sequence
  Description of Artificial Sequence: Synthetic peptide
  MOD_RES (6)..(6): phosphorylated serine
KLDIVSSQKVFFRKNWLRLTW

SEQ ID NO: 6372 - protein, 21 aa, Artificial Sequence
  Description of Artificial Sequence: Synthetic peptide
  MOD_RES (4)..(4): phosphorylated serine
KLDSFLDMQVFFRKNWLRLTW

SEQ ID NO: 6373 - protein, 20 aa, Artificial Sequence
  Description of Artificial Sequence: Synthetic peptide
  MOD_RES (4)..(4): phosphorylated serine
KLDSPRVTVFFRKNWLRLTW

SEQ ID NO: 6374 - protein, 21 aa, Artificial Sequence
  Description of Artificial Sequence: Synthetic peptide
  MOD_RES (4)..(4): phosphorylated serine
KLDSPTKVKKFFRKNWLRLTW

SEQ ID NO: 6375 - protein, 21 aa, Artificial Sequence
  Description of Artificial Sequence: Synthetic peptide
  MOD_RES (4)..(4): phosphorylated serine
KLDSPTKVKYFFRKNWLRLTW

SEQ ID NO: 6376 - protein, 21 aa, Artificial Sequence
  Description of Artificial Sequence: Synthetic peptide
  MOD_RES (6)..(6): phosphorylated threonine
KLFPDTPLALFFRKNWLRLTW

SEQ ID NO: 6377 - protein, 21 aa, Artificial Sequence
  Description of Artificial Sequence: Synthetic peptide
  MOD_RES (6)..(6): phosphorylated threonine
KLFPDTPLAVFFRKNWLRLTW

SEQ ID NO: 6378 - protein, 20 aa, Artificial Sequence
  Description of Artificial Sequence: Synthetic peptide
  MOD_RES (4)..(4): phosphorylated serine
KLFSGTVRKFFRKNWLRLTW

SEQ ID NO: 6379 - protein, 21 aa, Artificial Sequence
  Description of Artificial Sequence: Synthetic peptide
  MOD_RES (4)..(4): phosphorylated serine
KLFSGVFVKVFFRKNWLRLTW

SEQ ID NO: 6380 - protein, 20 aa, Artificial Sequence
  Description of Artificial Sequence: Synthetic peptide
  MOD_RES (4)..(4): phosphorylated serine
KLFSKQQGKFFRKNWLRLTW

SEQ ID NO: 6381 - protein, 20 aa, Artificial Sequence
  Description of Artificial Sequence: Synthetic peptide
  MOD_RES (4)..(4): phosphorylated serine
KLFSKQQGYFFRKNWLRLTW

SEQ ID NO: 6382 - protein, 20 aa, Artificial Sequence
  Description of Artificial Sequence: Synthetic peptide
  MOD_RES (4)..(4): phosphorylated serine
KLFSPAHKKFFRKNWLRLTW

SEQ ID NO: 6383 - protein, 20 aa, Artificial Sequence
  Description of Artificial Sequence: Synthetic peptide
  MOD_RES (4)..(4): phosphorylated serine
KLFSPAHKYFFRKNWLRLTW

SEQ ID NO: 6384 - protein, 22 aa, Artificial Sequence
  Description of Artificial Sequence: Synthetic peptide
  MOD_RES (4)..(4): phosphorylated serine
KLFSPSKEAELFFRKNWLRLTW

SEQ ID NO: 6385 - protein, 22 aa, Artificial Sequence
  Description of Artificial Sequence: Synthetic peptide
  MOD_RES (4)..(4): phosphorylated serine
KLFSPSKEAEVFFRKNWLRLTW

SEQ ID NO: 6386 - protein, 22 aa, Artificial Sequence
  Description of Artificial Sequence: Synthetic peptide
  MOD_RES (5)..(5): phosphorylated serine
KLHGSLARAGKFFRKNWLRLTW

SEQ ID NO: 6387 - protein, 22 aa, Artificial Sequence
  Description of Artificial Sequence: Synthetic peptide
  MOD_RES (5)..(5): phosphorylated serine
KLHGSLARAGYFFRKNWLRLTW

SEQ ID NO: 6388 - protein, 22 aa, Artificial Sequence
  Description of Artificial Sequence: Synthetic peptide
  MOD_RES (7)..(7): phosphorylated serine
KLIDIVSSQKVFFRKNWLRLTW

SEQ ID NO: 6389 - protein, 20 aa, Artificial Sequence
  Description of Artificial Sequence: Synthetic peptide
  MOD_RES (8)..(8): phosphorylated serine
KLIDRTESLFFRKNWLRLTW

SEQ ID NO: 6390 - protein, 21 aa, Artificial Sequence
  Description of Artificial Sequence: Synthetic peptide
  MOD_RES (6)..(6): phosphorylated serine
KLIDVSSQKVFFRKNWLRLTW

SEQ ID NO: 6391 - protein, 22 aa, Artificial Sequence
  Description of Artificial Sequence: Synthetic peptide
  MOD_RES (4)..(4): phosphorylated serine
KLISSSSLKEKFFRKNWLRLTW

SEQ ID NO: 6392 - protein, 22 aa, Artificial Sequence
  Description of Artificial Sequence: Synthetic peptide
  MOD_RES (4)..(4): phosphorylated serine
KLISSSSLKEYFFRKNWLRLTW

SEQ ID NO: 6393 - protein, 20 aa, Artificial Sequence
  Description of Artificial Sequence: Synthetic peptide
  MOD_RES (8)..(8): phosphorylated serine
KLKDRLPSIFFRKNWLRLTW

SEQ ID NO: 6394 - protein, 21 aa, Artificial Sequence
  Description of Artificial Sequence: Synthetic peptide
  MOD_RES (4)..(4): phosphorylated serine
KLKSNPDFLKFFRKNWLRLTW

SEQ ID NO: 6395 - protein, 22 aa, Artificial Sequence
  Description of Artificial Sequence: Synthetic peptide
  MOD_RES (4)..(4): phosphorylated serine
KLKSNPDFLKKFFRKNWLRLTW

SEQ ID NO: 6396 - protein, 22 aa, Artificial Sequence
  Description of Artificial Sequence: Synthetic peptide
  MOD_RES (4)..(4): phosphorylated serine
KLKSNPDFLKYFFRKNWLRLTW

SEQ ID NO: 6397 - protein, 20 aa, Artificial Sequence
  Description of Artificial Sequence: Synthetic peptide
  MOD_RES (4)..(4): phosphorylated serine
KLKSPAPGLFFRKNWLRLTW

SEQ ID NO: 6398 - protein, 20 aa, Artificial Sequence
  Description of Artificial Sequence: Synthetic peptide
  MOD_RES (4)..(4): phosphorylated serine
KLKSPAPGVFFRKNWLRLTW

SEQ ID NO: 6399 - protein, 20 aa, Artificial Sequence
  Description of Artificial Sequence: Synthetic peptide
  MOD_RES (4)..(4): phosphorylated serine
KLKSQEIFLFFRKNWLRLTW

SEQ ID NO: 6400 - protein, 22 aa, Artificial Sequence
  Description of Artificial Sequence: Synthetic peptide
  MOD_RES (5)..(5): phosphorylated serine
KLKSSPLIEKKFFRKNWLRLTW

SEQ ID NO: 6401 - protein, 22 aa, Artificial Sequence
  Description of Artificial Sequence: Synthetic peptide
  MOD_RES (5)..(5): phosphorylated serine
KLKSSPLIEKYFFRKNWLRLTW

SEQ ID NO: 6402 - protein, 20 aa, Artificial Sequence
  Description of Artificial Sequence: Synthetic peptide
  MOD_RES (4)..(4): phosphorylated threonine
KLKTPLVAKFFRKNWLRLTW

SEQ ID NO: 6403 - protein, 20 aa, Artificial Sequence
  Description of Artificial Sequence: Synthetic peptide
  MOD_RES (4)..(4): phosphorylated threonine
KLKTPLVARFFRKNWLRLTW

SEQ ID NO: 6404 - protein, 24 aa, Artificial Sequence
  Description of Artificial Sequence: Synthetic peptide
  MOD_RES (9)..(9): phosphorylated serine
KLLDFGSLSNLQVFFRKNWLRLTW

SEQ ID NO: 6405 - protein, 20 aa, Artificial Sequence
  Description of Artificial Sequence: Synthetic peptide
  MOD_RES (8)..(8): phosphorylated serine
KLLQFYPSLFFRKNWLRLTW

SEQ ID NO: 6406 - protein, 20 aa, Artificial Sequence
  Description of Artificial Sequence: Synthetic peptide
  MOD_RES (8)..(8): phosphorylated serine
KLLQFYPSVFFRKNWLRLTW

SEQ ID NO: 6407 - protein, 21 aa, Artificial Sequence
  Description of Artificial Sequence: Synthetic peptide
  MOD_RES (4)..(4): phosphorylated serine
KLLSPSDEKLFFRKNWLRLTW

SEQ ID NO: 6408 - protein, 21 aa, Artificial Sequence
  Description of Artificial Sequence: Synthetic peptide
  MOD_RES (4)..(4): phosphorylated serine
KLLSPSNEKLFFRKNWLRLTW

SEQ ID NO: 6409 - protein, 21 aa, Artificial Sequence
  Description of Artificial Sequence: Synthetic peptide
  MOD_RES (4)..(4): phosphorylated serine
KLLSPSNEKVFFRKNWLRLTW

SEQ ID NO: 6410 - protein, 21 aa, Artificial Sequence
  Description of Artificial Sequence: Synthetic peptide
  MOD_RES (9)..(9): phosphorylated threonine
KLLSSAQRTLFFRKNWLRLTW

SEQ ID NO: 6411 - protein, 21 aa, Artificial Sequence
  Description of Artificial Sequence: Synthetic peptide
  MOD_RES (9)..(9): phosphorylated threonine
KLLSSAQRTVFFRKNWLRLTW

SEQ ID NO: 6412 - protein, 21 aa, Artificial Sequence
  Description of Artificial Sequence: Synthetic peptide
  MOD_RES (4)..(4): phosphorylated serine
KLLSTEEMELFFRKNWLRLTW

SEQ ID NO: 6413 - protein, 21 aa, Artificial Sequence
  Description of Artificial Sequence: Synthetic peptide
  MOD_RES (4)..(4): phosphorylated serine
KLLSTEEMEVFFRKNWLRLTW

SEQ ID NO: 6414 - protein, 20 aa, Artificial Sequence
  Description of Artificial Sequence: Synthetic peptide
  MOD_RES (4)..(4): phosphorylated serine
KLLSVERIKFFRKNWLRLTW

SEQ ID NO: 6415 - protein, 20 aa, Artificial Sequence
  Description of Artificial Sequence: Synthetic peptide
  MOD_RES (4)..(4): phosphorylated threonine
KLLTPIKEKFFRKNWLRLTW

SEQ ID NO: 6416 - protein, 20 aa, Artificial Sequence
  Description of Artificial Sequence: Synthetic peptide
  MOD_RES (4)..(4): phosphorylated threonine
KLLTPIKEYFFRKNWLRLTW

SEQ ID NO: 6417 - protein, 20 aa, Artificial Sequence
  Description of Artificial Sequence: Synthetic peptide
  MOD_RES (8)..(8): phosphorylated serine
KLMAPDISLFFRKNWLRLTW

SEQ ID NO: 6418 - protein, 20 aa, Artificial Sequence
  Description of Artificial Sequence: Synthetic peptide
  MOD_RES (8)..(8): phosphorylated serine
KLMAPDISVFFRKNWLRLTW

SEQ ID NO: 6419 - protein, 21 aa, Artificial Sequence
  Description of Artificial Sequence: Synthetic peptide
  MOD_RES (9)..(9): phosphorylated serine
KLMIDRTESVFFRKNWLRLTW

SEQ ID NO: 6420 - protein, 20 aa, Artificial Sequence
  Description of Artificial Sequence: Synthetic peptide
  MOD_RES (4)..(4): phosphorylated serine
KLMSDVEDVFFRKNWLRLTW

SEQ ID NO: 6421 - protein, 20 aa, Artificial Sequence
  Description of Artificial Sequence: Synthetic peptide
  MOD_RES (4)..(4): phosphorylated serine
KLMSPKADVFFRKNWLRLTW

SEQ ID NO: 6422 - protein, 22 aa, Artificial Sequence
  Description of Artificial Sequence: Synthetic peptide
  MOD_RES (4)..(4): phosphorylated serine
KLMSPKADVKLFFRKNWLRLTW

SEQ ID NO: 6423 - protein, 22 aa, Artificial Sequence
  Description of Artificial Sequence: Synthetic peptide
  MOD_RES (4)..(4): phosphorylated serine
KLMSPKADVKVFFRKNWLRLTW

SEQ ID NO: 6424 - protein, 20 aa, Artificial Sequence
  Description of Artificial Sequence: Synthetic peptide
  MOD_RES (5)..(5): phosphorylated serine
KLPDSPALAFFRKNWLRLTW

SEQ ID NO: 6425 - protein, 21 aa, Artificial Sequence
  Description of Artificial Sequence: Synthetic peptide
  MOD_RES (5)..(5): phosphorylated serine
KLPDSPALAKFFRKNWLRLTW

SEQ ID NO: 6426 - protein, 22 aa, Artificial Sequence
  Description of Artificial Sequence: Synthetic peptide
  MOD_RES (5)..(5): phosphorylated serine
KLPDSPALAKKFFRKNWLRLTW

SEQ ID NO: 6427 - protein, 22 aa, Artificial Sequence
  Description of Artificial Sequence: Synthetic peptide
  MOD_RES (5)..(5): phosphorylated serine
KLPDSPALAKYFFRKNWLRLTW

SEQ ID NO: 6428 - protein, 21 aa, Artificial Sequence
  Description of Artificial Sequence: Synthetic peptide
  MOD_RES (5)..(5): phosphorylated serine
KLPDSPALAYFFRKNWLRLTW

SEQ ID NO: 6429 - protein, 21 aa, Artificial Sequence
  Description of Artificial Sequence: Synthetic peptide
  MOD_RES (4)..(4): phosphorylated serine
KLPSPAPARKFFRKNWLRLTW

SEQ ID NO: 6430 - protein, 21 aa, Artificial Sequence
  Description of Artificial Sequence: Synthetic peptide
  MOD_RES (5)..(5): phosphorylated serine
KLPTSPLKMKFFRKNWLRLTW

SEQ ID NO: 6431 - protein, 21 aa, Artificial Sequence
  Description of Artificial Sequence: Synthetic peptide
  MOD_RES (5)..(5): phosphorylated serine
KLPTSPLKMYFFRKNWLRLTW

SEQ ID NO: 6432 - protein, 21 aa, Artificial Sequence
  Description of Artificial Sequence: Synthetic peptide
  MOD_RES (5)..(5): phosphorylated threonine
KLPTTPVKAKFFRKNWLRLTW

SEQ ID NO: 6433 - protein, 21 aa, Artificial Sequence
  Description of Artificial Sequence: Synthetic peptide
  MOD_RES (5)..(5): phosphorylated threonine
KLPTTPVKAYFFRKNWLRLTW

SEQ ID NO: 6434 - protein, 20 aa, Artificial Sequence
  Description of Artificial Sequence: Synthetic peptide
  MOD_RES (8)..(8): phosphorylated threonine
KLQEFLQTLFFRKNWLRLTW

SEQ ID NO: 6435 - protein, 20 aa, Artificial Sequence
  Description of Artificial Sequence: Synthetic peptide
  MOD_RES (5)..(5): phosphorylated threonine
KLQVTSLSVFFRKNWLRLTW

SEQ ID NO: 6436 - protein, 20 aa, Artificial Sequence
  Description of Artificial Sequence: Synthetic peptide
  MOD_RES (4)..(4): phosphorylated serine
KLRSPFLQKFFRKNWLRLTW

SEQ ID NO: 6437 - protein, 20 aa, Artificial Sequence
  Description of Artificial Sequence: Synthetic peptide
  MOD_RES (4)..(4): phosphorylated serine
KLRSPFLQYFFRKNWLRLTW

SEQ ID NO: 6438 - protein, 21 aa, Artificial Sequence
  Description of Artificial Sequence: Synthetic peptide
  MOD_RES (5)..(5): phosphorylated serine
KLRSSPREAKFFRKNWLRLTW

SEQ ID NO: 6439 - protein, 20 aa, Artificial Sequence
  Description of Artificial Sequence: Synthetic peptide
  MOD_RES (5)..(5): phosphorylated serine
KLRTSPTFKFFRKNWLRLTW

SEQ ID NO: 6440 - protein, 21 aa, Artificial Sequence
  Description of Artificial Sequence: Synthetic peptide
  MOD_RES (3)..(3): phosphorylated serine
KLSGDQPAARFFRKNWLRLTW

SEQ ID NO: 6441 - protein, 18 aa, Artificial Sequence
  Description of Artificial Sequence: Synthetic peptide
  MOD_RES (6)..(6): phosphorylated serine
KLSGLSFFFRKNWLRLTW

SEQ ID NO: 6442 - protein, 20 aa, Artificial Sequence
  Description of Artificial Sequence: Synthetic peptide
  MOD_RES (4)..(4): phosphorylated serine
KLSSLGNLKFFRKNWLRLTW

SEQ ID NO: 6443 - protein, 21 aa, Artificial Sequence
  Description of Artificial Sequence: Synthetic peptide
  MOD_RES (4)..(4): phosphorylated serine
KLSSLGNLKKFFRKNWLRLTW

SEQ ID NO: 6444 - protein, 21 aa, Artificial Sequence
  Description of Artificial Sequence: Synthetic peptide
  MOD_RES (4)..(4): phosphorylated serine
KLSSLGNLKYFFRKNWLRLTW

SEQ ID NO: 6445 - protein, 21 aa, Artificial Sequence
  Description of Artificial Sequence: Synthetic peptide
  MOD_RES (4)..(4): phosphorylated serine
KLSSPRGGMKFFRKNWLRLTW

SEQ ID NO: 6446 - protein, 22 aa, Artificial Sequence
  Description of Artificial Sequence: Synthetic peptide
  MOD_RES (4)..(4): phosphorylated serine
KLSSPRGGMKKFFRKNWLRLTW

SEQ ID NO: 6447 - protein, 22 aa, Artificial Sequence
  Description of Artificial Sequence: Synthetic peptide
  MOD_RES (4)..(4): phosphorylated serine
KLSSPRGGMKYFFRKNWLRLTW

SEQ ID NO: 6448 - protein, 26 aa, Artificial Sequence
  Description of Artificial Sequence: Synthetic peptide
  MOD_RES (3)..(3): phosphorylated serine
KLSVIAEDSESGKQNFFRKNWLRLTW

SEQ ID NO: 6449 - protein, 27 aa, Artificial Sequence
  Description of Artificial Sequence: Synthetic peptide
  MOD_RES (3)..(3): phosphorylated serine
KLSVIAEDSESGKQNPFFRKNWLRLTW

SEQ ID NO: 6450 - protein, 28 aa, Artificial Sequence
  Description of Artificial Sequence: Synthetic peptide
  MOD_RES (3)..(3): phosphorylated serine
KLSVIAEDSESGKQNPGFFRKNWLRLTW

SEQ ID NO: 6451 - protein, 24 aa, Artificial Sequence
  Description of Artificial Sequence: Synthetic peptide
  MOD_RES (9)..(9): phosphorylated serine
KLVSFHDDSDEDLFFRKNWLRLTW

SEQ ID NO: 6452 - protein, 21 aa, Artificial Sequence
  Description of Artificial Sequence: Synthetic peptide
  MOD_RES (4)..(4): phosphorylated serine
KLYSEIDIKVFFRKNWLRLTW

SEQ ID NO: 6453 - protein, 20 aa, Artificial Sequence
  Description of Artificial Sequence: Synthetic peptide
  MOD_RES (4)..(4): phosphorylated serine
KLYSGNMEKFFRKNWLRLTW

SEQ ID NO: 6454 - protein, 20 aa, Artificial Sequence
  Description of Artificial Sequence: Synthetic peptide
  MOD_RES (4)..(4): phosphorylated serine
KMASLLHQVFFRKNWLRLTW

SEQ ID NO: 6455 - protein, 21 aa, Artificial Sequence
  Description of Artificial Sequence: Synthetic peptide
  MOD_RES (4)..(4): phosphorylated serine
KMASPELERLFFRKNWLRLTW

SEQ ID NO: 6456 - protein, 21 aa, Artificial Sequence
  Description of Artificial Sequence: Synthetic peptide
  MOD_RES (4)..(4): phosphorylated serine
KMASPELERVFFRKNWLRLTW

SEQ ID NO: 6457 - protein, 21 aa, Artificial Sequence
  Description of Artificial Sequence: Synthetic peptide
  MOD_RES (6)..(6): phosphorylated serine
KMDIVSSQKVFFRKNWLRLTW

SEQ ID NO: 6458 - protein, 21 aa, Artificial Sequence
  Description of Artificial Sequence: Synthetic peptide
  MOD_RES (4)..(4): phosphorylated serine
KMDSFLDMQLFFRKNWLRLTW

SEQ ID NO: 6459 - protein, 21 aa, Artificial Sequence
  Description of Artificial Sequence: Synthetic peptide
  MOD_RES (4)..(4): phosphorylated serine
KMDSFLDMQVFFRKNWLRLTW

SEQ ID NO: 6460 - protein, 20 aa, Artificial Sequence
  Description of Artificial Sequence: Synthetic peptide
  MOD_RES (4)..(4): phosphorylated serine
KMDSPRVTVFFRKNWLRLTW

SEQ ID NO: 6461 - protein, 21 aa, Artificial Sequence
  Description of Artificial Sequence: Synthetic peptide
  MOD_RES (4)..(4): phosphorylated serine
KMDSPTKVKKFFRKNWLRLTW

SEQ ID NO: 6462 - protein, 21 aa, Artificial Sequence
  Description of Artificial Sequence: Synthetic peptide
  MOD_RES (6)..(6): phosphorylated threonine
KMFPDTPLALFFRKNWLRLTW

SEQ ID NO: 6463 - protein, 21 aa, Artificial Sequence
  Description of Artificial Sequence: Synthetic peptide
  MOD_RES (6)..(6): phosphorylated threonine
KMFPDTPLAVFFRKNWLRLTW

SEQ ID NO: 6464 - protein, 20 aa, Artificial Sequence
  Description of Artificial Sequence: Synthetic peptide
  MOD_RES (4)..(4): phosphorylated serine
KMFSGTVRKFFRKNWLRLTW

SEQ ID NO: 6465 - protein, 21 aa, Artificial Sequence
  Description of Artificial Sequence: Synthetic peptide
  MOD_RES (4)..(4): phosphorylated serine
KMFSGVFVKVFFRKNWLRLTW

SEQ ID NO: 6466 - protein, 20 aa, Artificial Sequence
  Description of Artificial Sequence: Synthetic peptide
  MOD_RES (4)..(4): phosphorylated serine
KMFSKQQGKFFRKNWLRLTW

SEQ ID NO: 6467 - protein, 20 aa, Artificial Sequence
  Description of Artificial Sequence: Synthetic peptide
  MOD_RES (4)..(4): phosphorylated serine
KMFSPAHKKFFRKNWLRLTW

SEQ ID NO: 6468 - protein, 22 aa, Artificial Sequence
  Description of Artificial Sequence: Synthetic peptide
  MOD_RES (4)..(4): phosphorylated serine
KMFSPSKEAELFFRKNWLRLTW

SEQ ID NO: 6469 - protein, 22 aa, Artificial Sequence
  Description of Artificial Sequence: Synthetic peptide
  MOD_RES (4)..(4): phosphorylated serine
KMFSPSKEAEVFFRKNWLRLTW

SEQ ID NO: 6470 - protein, 22 aa, Artificial Sequence
  Description of Artificial Sequence: Synthetic peptide
  MOD_RES (5)..(5): phosphorylated serine
KMHGSLARAGKFFRKNWLRLTW

SEQ ID NO: 6471 - protein, 22 aa, Artificial Sequence
  Description of Artificial Sequence: Synthetic peptide
  MOD_RES (7)..(7): phosphorylated serine
KMIDIVSSQKVFFRKNWLRLTW

SEQ ID NO: 6472 - protein, 20 aa, Artificial Sequence
  Description of Artificial Sequence: Synthetic peptide
  MOD_RES (8)..(8): phosphorylated serine
KMIDRTESLFFRKNWLRLTW

SEQ ID NO: 6473 - protein, 22 aa, Artificial Sequence
  Description of Artificial Sequence: Synthetic peptide
  MOD_RES (4)..(4): phosphorylated serine
KMISSSSLKEKFFRKNWLRLTW

SEQ ID NO: 6474 - protein, 21 aa, Artificial Sequence
  Description of Artificial Sequence: Synthetic peptide
  MOD_RES (4)..(4): phosphorylated serine
KMKSNPDFLKFFRKNWLRLTW

SEQ ID NO: 6475 - protein, 22 aa, Artificial Sequence
  Description of Artificial Sequence: Synthetic peptide
  MOD_RES (4)..(4): phosphorylated serine
KMKSNPDFLKKFFRKNWLRLTW

SEQ ID NO: 6476 - protein, 22 aa, Artificial Sequence
  Description of Artificial Sequence: Synthetic peptide
  MOD_RES (4)..(4): phosphorylated serine
KMKSNPDFLKYFFRKNWLRLTW

SEQ ID NO: 6477 - protein, 22 aa, Artificial Sequence
  Description of Artificial Sequence: Synthetic peptide
  MOD_RES (5)..(5): phosphorylated serine
KMKSSPLIEKKFFRKNWLRLTW

SEQ ID NO: 6478 - protein, 20 aa, Artificial Sequence
  Description of Artificial Sequence: Synthetic peptide
  MOD_RES (4)..(4): phosphorylated threonine
KMKTPLVAKFFRKNWLRLTW

SEQ ID NO: 6479 - protein, 20 aa, Artificial Sequence
  Description of Artificial Sequence: Synthetic peptide
  MOD_RES (4)..(4): phosphorylated threonine
KMKTPLVARFFRKNWLRLTW

SEQ ID NO: 6480 - protein, 24 aa, Artificial Sequence
  Description of Artificial Sequence: Synthetic peptide
  MOD_RES (9)..(9): phosphorylated serine
KMLDFGSLSNLQVFFRKNWLRLTW

SEQ ID NO: 6481 - protein, 24 aa, Artificial Sequence
  Description of Artificial Sequence: Synthetic peptide
  MOD_RES (9)..(9): phosphorylated serine
KMLDFGSLSNLQVFFRKNWLRLTW

SEQ ID NO: 6482 - protein, 20 aa, Artificial Sequence
  Description of Artificial Sequence: Synthetic peptide
  MOD_RES (8)..(8): phosphorylated serine
KMLQFYPSLFFRKNWLRLTW

SEQ ID NO: 6483 - protein, 21 aa, Artificial Sequence
  Description of Artificial Sequence: Synthetic peptide
  MOD_RES (4)..(4): phosphorylated serine
KMLSPSNEKLFFRKNWLRLTW

SEQ ID NO: 6484 - protein, 21 aa, Artificial Sequence
  Description of Artificial Sequence: Synthetic peptide
  MOD_RES (4)..(4): phosphorylated serine
KMLSPSNEKVFFRKNWLRLTW

SEQ ID NO: 6485 - protein, 21 aa, Artificial Sequence
  Description of Artificial Sequence: Synthetic peptide
  MOD_RES (9)..(9): phosphorylated threonine
KMLSSAQRTLFFRKNWLRLTW

SEQ ID NO: 6486 - protein, 21 aa, Artificial Sequence
  Description of Artificial Sequence: Synthetic peptide
  MOD_RES (9)..(9): phosphorylated threonine
KMLSSAQRTVFFRKNWLRLTW

SEQ ID NO: 6487 - protein, 20 aa, Artificial Sequence
  Description of Artificial Sequence: Synthetic peptide
  MOD_RES (4)..(4): phosphorylated serine
KMLSVERIKFFRKNWLRLTW

SEQ ID NO: 6488 - protein, 20 aa, Artificial Sequence
  Description of Artificial Sequence: Synthetic peptide
  MOD_RES (4)..(4): phosphorylated threonine
KMLTPIKEKFFRKNWLRLTW

SEQ ID NO: 6489 - protein, 20 aa, Artificial Sequence
  Description of Artificial Sequence: Synthetic peptide
  MOD_RES (8)..(8): phosphorylated serine
KMMAPDISVFFRKNWLRLTW

SEQ ID NO: 6490 - protein, 22 aa, Artificial Sequence
  Description of Artificial Sequence: Synthetic peptide
  MOD_RES (4)..(4): phosphorylated serine
KMMSPKADVKLFFRKNWLRLTW

SEQ ID NO: 6491 - protein, 22 aa, Artificial Sequence
  Description of Artificial Sequence: Synthetic peptide
  MOD_RES (4)..(4): phosphorylated serine
KMMSPKADVKVFFRKNWLRLTW

SEQ ID NO: 6492 - protein, 21 aa, Artificial Sequence
  Description of Artificial Sequence: Synthetic peptide
  MOD_RES (5)..(5): phosphorylated serine
KMPTSPLKMKFFRKNWLRLTW

SEQ ID NO: 6493 - protein, 21 aa, Artificial Sequence
  Description of Artificial Sequence: Synthetic peptide
  MOD_RES (5)..(5): phosphorylated threonine
KMPTTPVKAKFFRKNWLRLTW

SEQ ID NO: 6494 - protein, 21 aa, Artificial Sequence
  Description of Artificial Sequence: Synthetic peptide
  MOD_RES (5)..(5): phosphorylated threonine
KMPTTPVKAYFFRKNWLRLTW

SEQ ID NO: 6495 - protein, 20 aa, Artificial Sequence
  Description of Artificial Sequence: Synthetic peptide
  MOD_RES (4)..(4): phosphorylated serine
KMRSPFLQKFFRKNWLRLTW

SEQ ID NO: 6496 - protein, 21 aa, Artificial Sequence
  Description of Artificial Sequence: Synthetic peptide
  MOD_RES (5)..(5): phosphorylated serine
KMRSSPREAKFFRKNWLRLTW

SEQ ID NO: 6497 - protein, 20 aa, Artificial Sequence
  Description of Artificial Sequence: Synthetic peptide
  MOD_RES (5)..(5): phosphorylated serine
KMRTSPTFKFFRKNWLRLTW

SEQ ID NO: 6498 - protein, 20 aa, Artificial Sequence
  Description of Artificial Sequence: Synthetic peptide
  MOD_RES (4)..(4): phosphorylated serine
KMSSLGNLKFFRKNWLRLTW

SEQ ID NO: 6499 - protein, 21 aa, Artificial Sequence
  Description of Artificial Sequence: Synthetic peptide
  MOD_RES (4)..(4): phosphorylated serine
KMSSLGNLKKFFRKNWLRLTW

SEQ ID NO: 6500 - protein, 21 aa, Artificial Sequence
  Description of Artificial Sequence: Synthetic peptide
  MOD_RES (4)..(4): phosphorylated serine
KMSSLGNLKYFFRKNWLRLTW

SEQ ID NO: 6501 - protein, 21 aa, Artificial Sequence
  Description of Artificial Sequence: Synthetic peptide
  MOD_RES (4)..(4): phosphorylated serine
KMSSPRGGMKFFRKNWLRLTW

SEQ ID NO: 6502 - protein, 22 aa, Artificial Sequence
  Description of Artificial Sequence: Synthetic peptide
  MOD_RES (4)..(4): phosphorylated serine
KMSSPRGGMKKFFRKNWLRLTW

SEQ ID NO: 6503 - protein, 21 aa, Artificial Sequence
  Description of Artificial Sequence: Synthetic peptide
  MOD_RES (4)..(4): phosphorylated serine
KMYSEIDIKVFFRKNWLRLTW

SEQ ID NO: 6504 - protein, 20 aa, Artificial Sequence
  Description of Artificial Sequence: Synthetic peptide
  MOD_RES (4)..(4): phosphorylated serine
KMYSGNMEKFFRKNWLRLTW

SEQ ID NO: 6505 - protein, 19 aa, Artificial Sequence
  Description of Artificial Sequence: Synthetic peptide
  MOD_RES (4)..(4): phosphorylated serine
KNRSWKYNFFRKNWLRLTW

SEQ ID NO: 6506 - protein, 20 aa, Artificial Sequence
  Description of Artificial Sequence: Synthetic peptide
  MOD_RES (4)..(4): phosphorylated serine
KNRSWKYNQFFRKNWLRLTW

SEQ ID NO: 6507 - protein, 25 aa, Artificial Sequence
  Description of Artificial Sequence: Synthetic peptide
  MOD_RES (4)..(4): phosphorylated serine
KNRSWKYNQSISLRFFRKNWLRLTW

SEQ ID NO: 6508 - protein, 27 aa, Artificial Sequence
  Description of Artificial Sequence: Synthetic peptide
  MOD_RES (4)..(4): phosphorylated serine
KNRSWKYNQSISLRRPFFRKNWLRLTW

SEQ ID NO: 6509 - protein, 20 aa, Artificial Sequence
  Description of Artificial Sequence: Synthetic peptide
  MOD_RES (4)..(4): phosphorylated serine
KPASPARRFFFRKNWLRLTW

SEQ ID NO: 6510 - protein, 20 aa, Artificial Sequence
  Description of Artificial Sequence: Synthetic peptide
  MOD_RES (4)..(4): phosphorylated serine
KPASPARRLFFRKNWLRLTW

SEQ ID NO: 6511 - protein, 20 aa, Artificial Sequence
  Description of Artificial Sequence: Synthetic peptide
  MOD_RES (4)..(4): phosphorylated serine
KPASPARRMFFRKNWLRLTW

SEQ ID NO: 6512 - protein, 20 aa, Artificial Sequence
  Description of Artificial Sequence: Synthetic peptide
  MOD_RES (4)..(4): phosphorylated serine
KPASPARRVFFRKNWLRLTW

SEQ ID NO: 6513 - protein, 22 aa, Artificial Sequence
  Description of Artificial Sequence: Synthetic peptide
  MOD_RES (4)..(4): phosphorylated serine
KPASPKFIVTFFFRKNWLRLTW

SEQ ID NO: 6514 - protein, 22 aa, Artificial Sequence
  Description of Artificial Sequence: Synthetic peptide
  MOD_RES (4)..(4): phosphorylated serine
KPASPKFIVTLFFRKNWLRLTW

SEQ ID NO: 6515 - protein, 22 aa, Artificial Sequence
  Description of Artificial Sequence: Synthetic peptide
  MOD_RES (4)..(4): phosphorylated serine
KPASPKFIVTMFFRKNWLRLTW

SEQ ID NO: 6516 - protein, 22 aa, Artificial Sequence
  Description of Artificial Sequence: Synthetic peptide
  MOD_RES (4)..(4): phosphorylated serine
KPASPKFIVTVFFRKNWLRLTW

SEQ ID NO: 6517 - protein, 20 aa, Artificial Sequence
  Description of Artificial Sequence: Synthetic peptide
  MOD_RES (4)..(4): phosphorylated serine
KPESRRSSLFFRKNWLRLTW

SEQ ID NO: 6518 - protein, 21 aa, Artificial Sequence
  Description of Artificial Sequence: Synthetic peptide
  MOD_RES (4)..(4): phosphorylated serine
  MOD_RES (7)..(7): phosphorylated serine
KPESRRSSLLFFRKNWLRLTW

SEQ ID NO: 6519 - protein, 21 aa, Artificial Sequence
  Description of Artificial Sequence: Synthetic peptide
  MOD_RES (4)..(4): phosphorylated serine
  MOD_RES (8)..(8): phosphorylated serine
KPESRRSSLLFFRKNWLRLTW

SEQ ID NO: 6520 - protein, 21 aa, Artificial Sequence
  Description of Artificial Sequence: Synthetic peptide
  MOD_RES (4)..(4): phosphorylated serine
KPESRRSSLLFFRKNWLRLTW

SEQ ID NO: 6521 - protein, 20 aa, Artificial Sequence
  Description of Artificial Sequence: Synthetic peptide
  MOD_RES (6)..(6): phosphorylated serine
KPLIRSQSLFFRKNWLRLTW

SEQ ID NO: 6522 - protein, 20 aa, Artificial Sequence
  Description of Artificial Sequence: Synthetic peptide
  MOD_RES (8)..(8): phosphorylated serine
KPLIRSQSLFFRKNWLRLTW

SEQ ID NO: 6523 - protein, 20 aa, Artificial Sequence
  Description of Artificial Sequence: Synthetic peptide
  MOD_RES (5)..(5): phosphorylated serine
KPPHSPLVFFFRKNWLRLTW

SEQ ID NO: 6524 - protein, 20 aa, Artificial Sequence
  Description of Artificial Sequence: Synthetic peptide
  MOD_RES (5)..(5): phosphorylated serine
KPPHSPLVLFFRKNWLRLTW

SEQ ID NO: 6525 - protein, 20 aa, Artificial Sequence
  Description of Artificial Sequence: Synthetic peptide
  MOD_RES (5)..(5): phosphorylated serine
KPPHSPLVMFFRKNWLRLTW

SEQ ID NO: 6526 - protein, 20 aa, Artificial Sequence
  Description of Artificial Sequence: Synthetic peptide
  MOD_RES (5)..(5): phosphorylated serine
KPPHSPLVVFFRKNWLRLTW

SEQ ID NO: 6527 - protein, 21 aa, Artificial Sequence
  Description of Artificial Sequence: Synthetic peptide
  MOD_RES (4)..(4): phosphorylated serine
KPPSPEHQSFFFRKNWLRLTW

SEQ ID NO: 6528 - protein, 21 aa, Artificial Sequence
  Description of Artificial Sequence: Synthetic peptide
  MOD_RES (4)..(4): phosphorylated serine
KPPSPEHQSLFFRKNWLRLTW

SEQ ID NO: 6529 - protein, 21 aa, Artificial Sequence
  Description of Artificial Sequence: Synthetic peptide
  MOD_RES (4)..(4): phosphorylated serine
KPPSPEHQSMFFRKNWLRLTW

SEQ ID NO: 6530 - protein, 21 aa, Artificial Sequence
  Description of Artificial Sequence: Synthetic peptide
  MOD_RES (4)..(4): phosphorylated serine
KPPSPEHQSVFFRKNWLRLTW

SEQ ID NO: 6531 - protein, 21 aa, Artificial Sequence
  Description of Artificial Sequence: Synthetic peptide
  MOD_RES (4)..(4): phosphorylated serine
KPPSPSPIEFFFRKNWLRLTW

SEQ ID NO: 6532 - protein, 21 aa, Artificial Sequence
  Description of Artificial Sequence: Synthetic peptide
  MOD_RES (4)..(4): phosphorylated serine
KPPSPSPIELFFRKNWLRLTW

SEQ ID NO: 6533 - protein, 21 aa, Artificial Sequence
  Description of Artificial Sequence: Synthetic peptide
  MOD_RES (4)..(4): phosphorylated serine
KPPSPSPIEMFFRKNWLRLTW

SEQ ID NO: 6534 - protein, 21 aa, Artificial Sequence
  Description of Artificial Sequence: Synthetic peptide
  MOD_RES (4)..(4): phosphorylated serine
KPPSPSPIEVFFRKNWLRLTW

SEQ ID NO: 6535 - protein, 20 aa, Artificial Sequence
  Description of Artificial Sequence: Synthetic peptide
  MOD_RES (4)..(4): phosphorylated threonine
KPPTPGASFFFRKNWLRLTW

SEQ ID NO: 6536 - protein, 20 aa, Artificial Sequence
  Description of Artificial Sequence: Synthetic peptide
  MOD_RES (4)..(4): phosphorylated threonine
KPPTPGASLFFRKNWLRLTW

SEQ ID NO: 6537 - protein, 20 aa, Artificial Sequence
  Description of Artificial Sequence: Synthetic peptide
  MOD_RES (4)..(4): phosphorylated threonine
KPPTPGASMFFRKNWLRLTW

SEQ ID NO: 6538 - protein, 20 aa, Artificial Sequence
  Description of Artificial Sequence: Synthetic peptide
  MOD_RES (4)..(4): phosphorylated threonine
KPPTPGASVFFRKNWLRLTW

SEQ ID NO: 6539 - protein, 20 aa, Artificial Sequence
  Description of Artificial Sequence: Synthetic peptide
  MOD_RES (8)..(8): phosphorylated serine
KPPYRSHSFFFRKNWLRLTW

SEQ ID NO: 6540 - protein, 20 aa, Artificial Sequence
  Description of Artificial Sequence: Synthetic peptide
  MOD_RES (8)..(8): phosphorylated serine
KPPYRSHSLFFRKNWLRLTW

SEQ ID NO: 6541 - protein, 20 aa, Artificial Sequence
  Description of Artificial Sequence: Synthetic peptide
  MOD_RES (8)..(8): phosphorylated serine
KPPYRSHSMFFRKNWLRLTW

SEQ ID NO: 6542 - protein, 20 aa, Artificial Sequence
  Description of Artificial Sequence: Synthetic peptide
  MOD_RES (8)..(8): phosphorylated serine
KPPYRSHSVFFRKNWLRLTW

SEQ ID NO: 6543 - protein, 20 aa, Artificial Sequence
  Description of Artificial Sequence: Synthetic peptide
  MOD_RES (8)..(8): phosphorylated threonine
KPQTRGKTFFFRKNWLRLTW

SEQ ID NO: 6544 - protein, 20 aa, Artificial Sequence
  Description of Artificial Sequence: Synthetic peptide
  MOD_RES (8)..(8): phosphorylated threonine
KPQTRGKTLFFRKNWLRLTW

SEQ ID NO: 6545 - protein, 20 aa, Artificial Sequence
  Description of Artificial Sequence: Synthetic peptide
  MOD_RES (8)..(8): phosphorylated threonine
KPQTRGKTMFFRKNWLRLTW

SEQ ID NO: 6546 - protein, 20 aa, Artificial Sequence
  Description of Artificial Sequence: Synthetic peptide
  MOD_RES (8)..(8): phosphorylated threonine
KPQTRGKTVFFRKNWLRLTW

SEQ ID NO: 6547 - protein, 20 aa, Artificial Sequence
  Description of Artificial Sequence: Synthetic peptide
  MOD_RES (6)..(6): phosphorylated serine
KPRPLSMDLFFRKNWLRLTW

SEQ ID NO: 6548 - protein, 20 aa, Artificial Sequence
  Description of Artificial Sequence: Synthetic peptide
  MOD_RES (8)..(8): phosphorylated serine
KPRPPPLSFFFRKNWLRLTW

SEQ ID NO: 6549 - protein, 20 aa, Artificial Sequence
  Description of Artificial Sequence: Synthetic peptide
  MOD_RES (8)..(8): phosphorylated serine
KPRPPPLSLFFRKNWLRLTW

SEQ ID NO: 6550 - protein, 20 aa, Artificial Sequence
  Description of Artificial Sequence: Synthetic peptide
  MOD_RES (8)..(8): phosphorylated serine
KPRPPPLSMFFRKNWLRLTW

SEQ ID NO: 6551 - protein, 20 aa, Artificial Sequence
  Description of Artificial Sequence: Synthetic peptide
  MOD_RES (8)..(8): phosphorylated serine
KPRPPPLSPFFRKNWLRLTW

SEQ ID NO: 6552 - protein, 20 aa, Artificial Sequence
  Description of Artificial Sequence: Synthetic peptide
  MOD_RES (8)..(8): phosphorylated serine
KPRPPPLSVFFRKNWLRLTW

SEQ ID NO: 6553 - protein, 20 aa, Artificial Sequence
  Description of Artificial Sequence: Synthetic peptide
  MOD_RES (6)..(6): phosphorylated serine
  MOD_RES (8)..(8): phosphorylated serine
KPRRFSRSLFFRKNWLRLTW

SEQ ID NO: 6554 - protein, 20 aa, Artificial Sequence
  Description of Artificial Sequence: Synthetic peptide
  MOD_RES (6)..(6): phosphorylated serine
KPRRFSRSLFFRKNWLRLTW

SEQ ID NO: 6555 - protein, 20 aa, Artificial Sequence
  Description of Artificial Sequence: Synthetic peptide
  MOD_RES (4)..(4): phosphorylated serine
KPRSPDHVFFFRKNWLRLTW

SEQ ID NO: 6556 - protein, 20 aa, Artificial Sequence
  Description of Artificial Sequence: Synthetic peptide
  MOD_RES (4)..(4): phosphorylated serine
KPRSPDHVLFFRKNWLRLTW

SEQ ID NO: 6557 - protein, 20 aa, Artificial Sequence
  Description of Artificial Sequence: Synthetic peptide
  MOD_RES (4)..(4): phosphorylated serine
KPRSPDHVMFFRKNWLRLTW

SEQ ID NO: 6558 - protein, 20 aa, Artificial Sequence
  Description of Artificial Sequence: Synthetic peptide
  MOD_RES (4)..(4): phosphorylated serine
KPRSPDHVVFFRKNWLRLTW

SEQ ID NO: 6559 - protein, 20 aa, Artificial Sequence
  Description of Artificial Sequence: Synthetic peptide
  MOD_RES (4)..(4): phosphorylated serine
KPRSPFSKIFFRKNWLRLTW

SEQ ID NO: 6560 - protein, 20 aa, Artificial Sequence
  Description of Artificial Sequence: Synthetic peptide
  MOD_RES (4)..(4): phosphorylated serine
KPRSPPRAFFFRKNWLRLTW

SEQ ID NO: 6561 - protein, 20 aa, Artificial Sequence
  Description of Artificial Sequence: Synthetic peptide
  MOD_RES (4)..(4): phosphorylated serine
KPRSPPRALFFRKNWLRLTW

SEQ ID NO: 6562 - protein, 21 aa, Artificial Sequence
  Description of Artificial Sequence: Synthetic peptide
  MOD_RES (4)..(4): phosphorylated serine
KPRSPPRALFFFRKNWLRLTW

SEQ ID NO: 6563 - protein, 21 aa, Artificial Sequence
  Description of Artificial Sequence: Synthetic peptide
  MOD_RES (4)..(4): phosphorylated serine
KPRSPPRALLFFRKNWLRLTW

SEQ ID NO: 6564 - protein, 21 aa, Artificial Sequence
  Description of Artificial Sequence: Synthetic peptide
  MOD_RES (4)..(4): phosphorylated serine
KPRSPPRALMFFRKNWLRLTW

SEQ ID NO: 6565 - protein, 21 aa, Artificial Sequence
  Description of Artificial Sequence: Synthetic peptide
  MOD_RES (4)..(4): phosphorylated serine
KPRSPPRALVFFRKNWLRLTW

SEQ ID NO: 6566 - protein, 22 aa, Artificial Sequence
  Description of Artificial Sequence: Synthetic peptide
  MOD_RES (4)..(4): phosphorylated serine
KPRSPPRALVFFFRKNWLRLTW

SEQ ID NO: 6567 - protein, 22 aa, Artificial Sequence
  Description of Artificial Sequence: Synthetic peptide
  MOD_RES (4)..(4): phosphorylated serine
KPRSPPRALVLFFRKNWLRLTW

SEQ ID NO: 6568 - protein, 23 aa, Artificial Sequence
  Description of Artificial Sequence: Synthetic peptide
  MOD_RES (4)..(4): phosphorylated serine
KPRSPPRALVLFFFRKNWLRLTW

SEQ ID NO: 6569 - protein, 23 aa, Artificial Sequence
  Description of Artificial Sequence: Synthetic peptide
  MOD_RES (4)..(4): phosphorylated serine
KPRSPPRALVLLFFRKNWLRLTW

SEQ ID NO: 6570 - protein, 23 aa, Artificial Sequence
  Description of Artificial Sequence: Synthetic peptide
  MOD_RES (4)..(4): phosphorylated serine
KPRSPPRALVLMFFRKNWLRLTW

SEQ ID NO: 6571 - protein, 23 aa, Artificial Sequence
  Description of Artificial Sequence: Synthetic peptide
  MOD_RES (4)..(4): phosphorylated serine
KPRSPPRALVLPFFRKNWLRLTW

SEQ ID NO: 6572 - protein, 23 aa, Artificial Sequence
  Description of Artificial Sequence: Synthetic peptide
  MOD_RES (4)..(4): phosphorylated serine
KPRSPPRALVLVFFRKNWLRLTW

SEQ ID NO: 6573 - protein, 22 aa, Artificial Sequence
  Description of Artificial Sequence: Synthetic peptide
  MOD_RES (4)..(4): phosphorylated serine
KPRSPPRALVMFFRKNWLRLTW

SEQ ID NO: 6574 - protein, 22 aa, Artificial Sequence
  Description of Artificial Sequence: Synthetic peptide
  MOD_RES (4)..(4): phosphorylated serine
KPRSPPRALVVFFRKNWLRLTW

SEQ ID NO: 6575 - protein, 20 aa, Artificial Sequence
  Description of Artificial Sequence: Synthetic peptide
  MOD_RES (4)..(4): phosphorylated serine
KPRSPPRAMFFRKNWLRLTW

SEQ ID NO: 6576 - protein, 20 aa, Artificial Sequence
  Description of Artificial Sequence: Synthetic peptide
  MOD_RES (4)..(4): phosphorylated serine
KPRSPPRAVFFRKNWLRLTW

SEQ ID NO: 6577 - protein, 20 aa, Artificial Sequence
  Description of Artificial Sequence: Synthetic peptide
  MOD_RES (4)..(4): phosphorylated serine
KPRSPVVEFFFRKNWLRLTW

SEQ ID NO: 6578 - protein, 20 aa, Artificial Sequence
  Description of Artificial Sequence: Synthetic peptide
  MOD_RES (4)..(4): phosphorylated serine
KPRSPVVELFFRKNWLRLTW

SEQ ID NO: 6579 - protein, 20 aa, Artificial Sequence
  Description of Artificial Sequence: Synthetic peptide
  MOD_RES (4)..(4): phosphorylated serine
KPRSPVVEMFFRKNWLRLTW

SEQ ID NO: 6580 - protein, 20 aa, Artificial Sequence
  Description of Artificial Sequence: Synthetic peptide
  MOD_RES (4)..(4): phosphorylated serine
KPRSPVVEVFFRKNWLRLTW

SEQ ID NO: 6581 - protein, 20 aa, Artificial Sequence
  Description of Artificial Sequence: Synthetic peptide
  MOD_RES (4)..(4): phosphorylated serine
KPSSPRGSLFFRKNWLRLTW

SEQ ID NO: 6582 - protein, 21 aa, Artificial Sequence
  Description of Artificial Sequence: Synthetic peptide
  MOD_RES (4)..(4): phosphorylated serine
KPSSPRGSLLFFRKNWLRLTW

SEQ ID NO: 6583 - protein, 21 aa, Artificial Sequence
  Description of Artificial Sequence: Synthetic peptide
  MOD_RES (4)..(4): phosphorylated serine
KPVSPKSGTLFFRKNWLRLTW

SEQ ID NO: 6584 - protein, 20 aa, Artificial Sequence
  Description of Artificial Sequence: Synthetic peptide
  MOD_RES (4)..(4): phosphorylated serine
KPYSPLASFFFRKNWLRLTW

SEQ ID NO: 6585 - protein, 20 aa, Artificial Sequence
  Description of Artificial Sequence: Synthetic peptide
  MOD_RES (4)..(4): phosphorylated serine
KPYSPLASLFFRKNWLRLTW

SEQ ID NO: 6586 - protein, 20 aa, Artificial Sequence
  Description of Artificial Sequence: Synthetic peptide
  MOD_RES (4)..(4): phosphorylated serine
KPYSPLASMFFRKNWLRLTW

SEQ ID NO: 6587 - protein, 20 aa, Artificial Sequence
  Description of Artificial Sequence: Synthetic peptide
  MOD_RES (4)..(4): phosphorylated serine
KPYSPLASVFFRKNWLRLTW

SEQ ID NO: 6588 - protein, 20 aa, Artificial Sequence
  Description of Artificial Sequence: Synthetic peptide
  MOD_RES (4)..(4): phosphorylated serine
KQDSLVINLFFRKNWLRLTW

SEQ ID NO: 6589 - protein, 20 aa, Artificial Sequence
  Description of Artificial Sequence: Synthetic peptide
  MOD_RES (4)..(4): phosphorylated serine
KRASFAKSFFFRKNWLRLTW

SEQ ID NO: 6590 - protein, 20 aa, Artificial Sequence
  Description of Artificial Sequence: Synthetic peptide
  MOD_RES (4)..(4): phosphorylated serine
KRASFAKSKFFRKNWLRLTW

SEQ ID NO: 6591 - protein, 20 aa, Artificial Sequence
  Description of Artificial Sequence: Synthetic peptide
  MOD_RES (4)..(4): phosphorylated serine
KRASFAKSLFFRKNWLRLTW

SEQ ID NO: 6592 - protein, 20 aa, Artificial Sequence
  Description of Artificial Sequence: Synthetic peptide
  MOD_RES (4)..(4): phosphorylated serine
KRASFAKSMFFRKNWLRLTW

SEQ ID NO: 6593 - protein, 20 aa, Artificial Sequence
  Description of Artificial Sequence: Synthetic peptide
  MOD_RES (4)..(4): phosphorylated serine
KRASFAKSRFFRKNWLRLTW

SEQ ID NO: 6594 - protein, 20 aa, Artificial Sequence
  Description of Artificial Sequence: Synthetic peptide
  MOD_RES (4)..(4): phosphorylated serine
KRASFAKSVFFRKNWLRLTW

SEQ ID NO: 6595 - protein, 20 aa, Artificial Sequence
  Description of Artificial Sequence: Synthetic peptide
  MOD_RES (4)..(4): phosphorylated serine
KRASFAKSYFFRKNWLRLTW

SEQ ID NO: 6596 - protein, 21 aa, Artificial Sequence
  Description of Artificial Sequence: Synthetic peptide
  MOD_RES (4)..(4): phosphorylated serine
KRASGQAFEFFFRKNWLRLTW

SEQ ID NO: 6597 - protein, 21 aa, Artificial Sequence
  Description of Artificial Sequence: Synthetic peptide
  MOD_RES (4)..(4): phosphorylated serine
KRASGQAFEKFFRKNWLRLTW

SEQ ID NO: 6598 - protein, 21 aa, Artificial Sequence
  Description of Artificial Sequence: Synthetic peptide
  MOD_RES (4)..(4): phosphorylated serine
KRASGQAFELFFRKNWLRLTW

SEQ ID NO: 6599 - protein, 21 aa, Artificial Sequence
  Description of Artificial Sequence: Synthetic peptide
  MOD_RES (4)..(4): phosphorylated serine
KRASGQAFERFFRKNWLRLTW

SEQ ID NO: 6600 - protein, 21 aa, Artificial Sequence
  Description of Artificial Sequence: Synthetic peptide
  MOD_RES (4)..(4): phosphorylated serine
KRASGQAFEYFFRKNWLRLTW

SEQ ID NO: 6601 - protein, 20 aa, Artificial Sequence
  Description of Artificial Sequence: Synthetic peptide
  MOD_RES (5)..(5): phosphorylated serine
KRASSPFRFFFRKNWLRLTW

SEQ ID NO: 6602 - protein, 20 aa, Artificial Sequence
  Description of Artificial Sequence: Synthetic peptide
  MOD_RES (5)..(5): phosphorylated serine
KRASSPFRKFFRKNWLRLTW

SEQ ID NO: 6603 - protein, 20 aa, Artificial Sequence
  Description of Artificial Sequence: Synthetic peptide
  MOD_RES (5)..(5): phosphorylated serine
KRASSPFRLFFRKNWLRLTW

SEQ ID NO: 6604 - protein, 20 aa, Artificial Sequence
  Description of Artificial Sequence: Synthetic peptide
  MOD_RES (5)..(5): phosphorylated serine
KRASSPFRMFFRKNWLRLTW

SEQ ID NO: 6605 - protein, 20 aa, Artificial Sequence
  Description of Artificial Sequence: Synthetic peptide
  MOD_RES (5)..(5): phosphorylated serine
KRASSPFRRFFRKNWLRLTW

SEQ ID NO: 6606 - protein, 20 aa, Artificial Sequence
  Description of Artificial Sequence: Synthetic peptide
  MOD_RES (5)..(5): phosphorylated serine
KRASSPFRYFFRKNWLRLTW

SEQ ID NO: 6607 - protein, 20 aa, Artificial Sequence
  Description of Artificial Sequence: Synthetic peptide
  MOD_RES (4)..(4): phosphorylated serine
KRASVFVKFFFRKNWLRLTW

SEQ ID NO: 6608 - protein, 20 aa, Artificial Sequence
  Description of Artificial Sequence: Synthetic peptide
  MOD_RES (4)..(4): phosphorylated serine
KRASVFVKKFFRKNWLRLTW

SEQ ID NO: 6609 - protein, 20 aa, Artificial Sequence
  Description of Artificial Sequence: Synthetic peptide
  MOD_RES (4)..(4): phosphorylated serine
KRASVFVKLFFRKNWLRLTW

SEQ ID NO: 6610 - protein, 20 aa, Artificial Sequence
  Description of Artificial Sequence: Synthetic peptide
  MOD_RES (4)..(4): phosphorylated serine
KRASVFVKMFFRKNWLRLTW

SEQ ID NO: 6611 - protein, 20 aa, Artificial Sequence
  Description of Artificial Sequence: Synthetic peptide
  MOD_RES (4)..(4): phosphorylated serine
KRASVFVKRFFRKNWLRLTW

SEQ ID NO: 6612 - protein, 20 aa, Artificial Sequence
  Description of Artificial Sequence: Synthetic peptide
  MOD_RES (4)..(4): phosphorylated serine
KRASVFVKYFFRKNWLRLTW

SEQ ID NO: 6613 - protein, 20 aa, Artificial Sequence
  Description of Artificial Sequence: Synthetic peptide
  MOD_RES (4)..(4): phosphorylated serine
KRASYILRLFFRKNWLRLTW

SEQ ID NO: 6614 - protein, 18 aa, Artificial Sequence
  Description of Artificial Sequence: Synthetic peptide
  MOD_RES (4)..(4): phosphorylated serine
KRFSFKFFFRKNWLRLTW

SEQ ID NO: 6615 - protein, 18 aa, Artificial Sequence
  Description of Artificial Sequence: Synthetic peptide
  MOD_RES (4)..(4): phosphorylated serine
KRFSFKKFFRKNWLRLTW

SEQ ID NO: 6616 - protein, 20 aa, Artificial Sequence
  Description of Artificial Sequence: Synthetic peptide
  MOD_RES (4)..(4): phosphorylated serine
  MOD_RES (8)..(8): phosphorylated serine
KRFSFKKSFFFRKNWLRLTW

SEQ ID NO: 6617 - protein, 20 aa, Artificial Sequence
  Description of Artificial Sequence: Synthetic peptide
  MOD_RES (4)..(4): phosphorylated serine
KRFSFKKSFFFRKNWLRLTW

SEQ ID NO: 6618 - protein, 20 aa, Artificial Sequence
  Description of Artificial Sequence: Synthetic peptide
  MOD_RES (4)..(4): phosphorylated serine
KRFSFKKSKFFRKNWLRLTW

SEQ ID NO: 6619 - protein, 20 aa, Artificial Sequence
  Description of Artificial Sequence: Synthetic peptide
  MOD_RES (4)..(4): phosphorylated serine
KRFSFKKSLFFRKNWLRLTW

SEQ ID NO: 6620 - protein, 20 aa, Artificial Sequence
  Description of Artificial Sequence: Synthetic peptide
  MOD_RES (4)..(4): phosphorylated serine
KRFSFKKSMFFRKNWLRLTW

SEQ ID NO: 6621 - protein, 20 aa, Artificial Sequence
  Description of Artificial Sequence: Synthetic peptide
  MOD_RES (4)..(4): phosphorylated serine
KRFSFKKSRFFRKNWLRLTW

SEQ ID NO: 6622 - protein, 20 aa, Artificial Sequence
  Description of Artificial Sequence: Synthetic peptide
  MOD_RES (4)..(4): phosphorylated serine
KRFSFKKSYFFRKNWLRLTW

SEQ ID NO: 6623 - protein, 18 aa, Artificial Sequence
  Description of Artificial Sequence: Synthetic peptide
  MOD_RES (4)..(4): phosphorylated serine
KRFSFKLFFRKNWLRLTW

SEQ ID NO: 6624 - protein, 18 aa, Artificial Sequence
  Description of Artificial Sequence: Synthetic peptide
  MOD_RES (4)..(4): phosphorylated serine
KRFSFKMFFRKNWLRLTW

SEQ ID NO: 6625 - protein, 18 aa, Artificial Sequence
  Description of Artificial Sequence: Synthetic peptide
  MOD_RES (4)..(4): phosphorylated serine
KRFSFKRFFRKNWLRLTW

SEQ ID NO: 6626 - protein, 20 aa, Artificial Sequence
  Description of Artificial Sequence: Synthetic peptide
  MOD_RES (4)..(4): phosphorylated serine
  MOD_RES (7)..(7): phosphorylated serine
KRFSFKSSFFFRKNWLRLTW

SEQ ID NO: 6627 - protein, 18 aa, Artificial Sequence
  Description of Artificial Sequence: Synthetic peptide
  MOD_RES (4)..(4): phosphorylated serine
KRFSFKYFFRKNWLRLTW

SEQ ID NO: 6628 - protein, 20 aa, Artificial Sequence
  Description of Artificial Sequence: Synthetic peptide
  MOD_RES (4)..(4): phosphorylated serine
KRFSGTVRFFFRKNWLRLTW

SEQ ID NO: 6629 - protein, 20 aa, Artificial Sequence
  Description of Artificial Sequence: Synthetic peptide
  MOD_RES (4)..(4): phosphorylated serine
KRFSGTVRKFFRKNWLRLTW

SEQ ID NO: 6630 - protein, 20 aa, Artificial Sequence
  Description of Artificial Sequence: Synthetic peptide
  MOD_RES (4)..(4): phosphorylated serine
KRFSGTVRLFFRKNWLRLTW

SEQ ID NO: 6631 - protein, 20 aa, Artificial Sequence
  Description of Artificial Sequence: Synthetic peptide
  MOD_RES (4)..(4): phosphorylated serine
KRFSGTVRMFFRKNWLRLTW

SEQ ID NO: 6632 - protein, 20 aa, Artificial Sequence
  Description of Artificial Sequence: Synthetic peptide
  MOD_RES (4)..(4): phosphorylated serine
KRFSGTVRRFFRKNWLRLTW

SEQ ID NO: 6633 - protein, 20 aa, Artificial Sequence
  Description of Artificial Sequence: Synthetic peptide
  MOD_RES (4)..(4): phosphorylated serine
KRFSGTVRYFFRKNWLRLTW

SEQ ID NO: 6634 - protein, 21 aa, Artificial Sequence
  Description of Artificial Sequence: Synthetic peptide
  MOD_RES (6)..(6): phosphorylated serine
KRIVISPKPFFFRKNWLRLTW

SEQ ID NO: 6635 - protein, 20 aa, Artificial Sequence
  Description of Artificial Sequence: Synthetic peptide
  MOD_RES (4)..(4): phosphorylated serine
KRKSFTSLYFFRKNWLRLTW

SEQ ID NO: 6636 - protein, 20 aa, Artificial Sequence
  Description of Artificial Sequence: Synthetic peptide
  MOD_RES (6)..(6): phosphorylated serine
KRLEKSPSFFFRKNWLRLTW

SEQ ID NO: 6637 - protein, 20 aa, Artificial Sequence
  Description of Artificial Sequence: Synthetic peptide
  MOD_RES (8)..(8): phosphorylated serine
KRLEKSPSFFFRKNWLRLTW

SEQ ID NO: 6638 - protein, 20 aa, Artificial Sequence
  Description of Artificial Sequence: Synthetic peptide
  MOD_RES (4)..(4): phosphorylated serine
KRLSPAPQFFFRKNWLRLTW

SEQ ID NO: 6639 - protein, 20 aa, Artificial Sequence
  Description of Artificial Sequence: Synthetic peptide
  MOD_RES (4)..(4): phosphorylated serine
KRLSPAPQKFFRKNWLRLTW

SEQ ID NO: 6640 - protein, 20 aa, Artificial Sequence
  Description of Artificial Sequence: Synthetic peptide
  MOD_RES (4)..(4): phosphorylated serine
KRLSPAPQLFFRKNWLRLTW

SEQ ID NO: 6641 - protein, 20 aa, Artificial Sequence
  Description of Artificial Sequence: Synthetic peptide
  MOD_RES (4)..(4): phosphorylated serine
KRLSPAPQMFFRKNWLRLTW

SEQ ID NO: 6642 - protein, 20 aa, Artificial Sequence
  Description of Artificial Sequence: Synthetic peptide
  MOD_RES (4)..(4): phosphorylated serine
KRLSPAPQRFFRKNWLRLTW

SEQ ID NO: 6643 - protein, 20 aa, Artificial Sequence
  Description of Artificial Sequence: Synthetic peptide
  MOD_RES (4)..(4): phosphorylated serine
KRLSPAPQYFFRKNWLRLTW

SEQ ID NO: 6644 - protein, 21 aa, Artificial Sequence
  Description of Artificial Sequence: Synthetic peptide
  MOD_RES (4)..(4): phosphorylated serine
KRLSTSPVRLFFRKNWLRLTW

SEQ ID NO: 6645 - protein, 20 aa, Artificial Sequence
  Description of Artificial Sequence: Synthetic peptide
  MOD_RES (4)..(4): phosphorylated serine
KRLSVERIFFFRKNWLRLTW

SEQ ID NO: 6646 - protein, 20 aa, Artificial Sequence
  Description of Artificial Sequence: Synthetic peptide
  MOD_RES (4)..(4): phosphorylated serine
KRLSVERIKFFRKNWLRLTW

SEQ ID NO: 6647 - protein, 20 aa, Artificial Sequence
  Description of Artificial Sequence: Synthetic peptide
  MOD_RES (4)..(4): phosphorylated serine
KRLSVERILFFRKNWLRLTW

SEQ ID NO: 6648 - protein, 20 aa, Artificial Sequence
  Description of Artificial Sequence: Synthetic peptide
  MOD_RES (4)..(4): phosphorylated serine
KRLSVERIMFFRKNWLRLTW

SEQ ID NO: 6649 - protein, 20 aa, Artificial Sequence
  Description of Artificial Sequence: Synthetic peptide
  MOD_RES (4)..(4): phosphorylated serine
KRLSVERIRFFRKNWLRLTW

SEQ ID NO: 6650 - protein, 20 aa, Artificial Sequence
  Description of Artificial Sequence: Synthetic peptide
  MOD_RES (4)..(4): phosphorylated serine
KRLSVERIYFFRKNWLRLTW

SEQ ID NO: 6651 - protein, 19 aa, Artificial Sequence
  Description of Artificial Sequence: Synthetic peptide
  MOD_RES (4)..(4): phosphorylated serine
KRMSPKEFFFRKNWLRLTW

SEQ ID NO: 6652 - protein, 19 aa, Artificial Sequence
  Description of Artificial Sequence: Synthetic peptide
  MOD_RES (4)..(4): phosphorylated serine
KRMSPKEKFFRKNWLRLTW

SEQ ID NO: 6653 - protein, 19 aa, Artificial Sequence
  Description of Artificial Sequence: Synthetic peptide
  MOD_RES (4)..(4): phosphorylated serine
KRMSPKELFFRKNWLRLTW

SEQ ID NO: 6654 - protein, 19 aa, Artificial Sequence
  Description of Artificial Sequence: Synthetic peptide
  MOD_RES (4)..(4): phosphorylated serine
KRMSPKERFFRKNWLRLTW

SEQ ID NO: 6655 - protein, 19 aa, Artificial Sequence
  Description of Artificial Sequence: Synthetic peptide
  MOD_RES (4)..(4): phosphorylated serine
KRMSPKEYFFRKNWLRLTW

SEQ ID NO: 6656 - protein, 20 aa, Artificial Sequence
  Description of Artificial Sequence: Synthetic peptide
  MOD_RES (3)..(3): oxidized methionine
  MOD_RES (4)..(4): phosphorylated serine
KRMSPKPELFFRKNWLRLTW

SEQ ID NO: 6657 - protein, 20 aa, Artificial Sequence
  Description of Artificial Sequence: Synthetic peptide
  MOD_RES (4)..(4): phosphorylated serine
KRMSPKPELFFRKNWLRLTW

SEQ ID NO: 6658 - protein, 19 aa, Artificial Sequence
  Description of Artificial Sequence: Synthetic peptide
  MOD_RES (4)..(4): phosphorylated serine
KRMSPKPFFFRKNWLRLTW

SEQ ID NO: 6659 - protein, 19 aa, Artificial Sequence
  Description of Artificial Sequence: Synthetic peptide
  MOD_RES (4)..(4): phosphorylated serine
KRMSPKPKFFRKNWLRLTW

SEQ ID NO: 6660 - protein, 19 aa, Artificial Sequence
  Description of Artificial Sequence: Synthetic peptide
  MOD_RES (4)..(4): phosphorylated serine
KRMSPKPLFFRKNWLRLTW

SEQ ID NO: 6661 - protein, 19 aa, Artificial Sequence
  Description of Artificial Sequence: Synthetic peptide
  MOD_RES (4)..(4): phosphorylated serine
KRMSPKPMFFRKNWLRLTW

SEQ ID NO: 6662 - protein, 19 aa, Artificial Sequence
  Description of Artificial Sequence: Synthetic peptide
  MOD_RES (4)..(4): phosphorylated serine
KRMSPKPRFFRKNWLRLTW

SEQ ID NO: 6663 - protein, 19 aa, Artificial Sequence
  Description of Artificial Sequence: Synthetic peptide
  MOD_RES (4)..(4): phosphorylated serine
KRMSPKPYFFRKNWLRLTW

SEQ ID NO: 6664 - protein, 20 aa, Artificial Sequence
  Description of Artificial Sequence: Synthetic peptide
  MOD_RES (5)..(5): phosphorylated serine
KRPESPPSIFFRKNWLRLTW

SEQ ID NO: 6665 - protein, 20 aa, Artificial Sequence
  Description of Artificial Sequence: Synthetic peptide
  MOD_RES (5)..(5): phosphorylated serine
KRWQSPVTKFFRKNWLRLTW

SEQ ID NO: 6666 - protein, 20 aa, Artificial Sequence
  Description of Artificial Sequence: Synthetic peptide
  MOD_RES (4)..(4): phosphorylated serine
KRYSEPVSLFFRKNWLRLTW

SEQ ID NO: 6667 - protein, 20 aa, Artificial Sequence
  Description of Artificial Sequence: Synthetic peptide
  MOD_RES (4)..(4): phosphorylated serine
KRYSGNMEFFFRKNWLRLTW

SEQ ID NO: 6668 - protein, 20 aa, Artificial Sequence
  Description of Artificial Sequence: Synthetic peptide
  MOD_RES (4)..(4): phosphorylated serine
KRYSGNMEKFFRKNWLRLTW

SEQ ID NO: 6669 - protein, 20 aa, Artificial Sequence
  Description of Artificial Sequence: Synthetic peptide
  MOD_RES (4)..(4): phosphorylated serine
KRYSGNMELFFRKNWLRLTW

SEQ ID NO: 6670 - protein, 20 aa, Artificial Sequence
  Description of Artificial Sequence: Synthetic peptide
  MOD_RES (4)..(4): phosphorylated serine
KRYSGNMEMFFRKNWLRLTW

SEQ ID NO: 6671 - protein, 20 aa, Artificial Sequence
  Description of Artificial Sequence: Synthetic peptide
  MOD_RES (4)..(4): phosphorylated serine
KRYSGNMERFFRKNWLRLTW

SEQ ID NO: 6672 - protein, 20 aa, Artificial Sequence
  Description of Artificial Sequence: Synthetic peptide
  MOD_RES (4)..(4): phosphorylated serine
  MOD_RES (7)..(7): oxidized methionine
KRYSGNMEYFFRKNWLRLTW

SEQ ID NO: 6673 - protein, 20 aa, Artificial Sequence
  Description of Artificial Sequence: Synthetic peptide
  MOD_RES (4)..(4): phosphorylated serine
KRYSGNMEYFFRKNWLRLTW

SEQ ID NO: 6674 - protein, 20 aa, Artificial Sequence
  Description of Artificial Sequence: Synthetic peptide
  MOD_RES (4)..(4): phosphorylated serine
KRYSRALYLFFRKNWLRLTW

SEQ ID NO: 6675 - protein, 20 aa, Artificial Sequence
  Description of Artificial Sequence: Synthetic peptide
  MOD_RES (4)..(4): phosphorylated serine
KSDSRQERYFFRKNWLRLTW

SEQ ID NO: 6676 - protein, 20 aa, Artificial Sequence
  Description of Artificial Sequence: Synthetic peptide
  MOD_RES (4)..(4): phosphorylated serine
KSESRQERYFFRKNWLRLTW

SEQ ID NO: 6677 - protein, 20 aa, Artificial Sequence
  Description of Artificial Sequence: Synthetic peptide
  MOD_RES (8)..(8): phosphorylated threonine
KSGELLATWFFRKNWLRLTW

SEQ ID NO: 6678 - protein, 22 aa, Artificial Sequence
  Description of Artificial Sequence: Synthetic peptide
  MOD_RES (4)..(4): phosphorylated serine
KSKSNPDFLKKFFRKNWLRLTW

SEQ ID NO: 6679 - protein, 21 aa, Artificial Sequence
  Description of Artificial Sequence: Synthetic peptide
  MOD_RES (4)..(4): phosphorylated serine
KSKSNPFLKKFFRKNWLRLTW

SEQ ID NO: 6680 - protein, 20 aa, Artificial Sequence
  Description of Artificial Sequence: Synthetic peptide
  MOD_RES (4)..(4): phosphorylated threonine
KSKTPLVAKFFRKNWLRLTW

SEQ ID NO: 6681 - protein, 20 aa, Artificial Sequence
  Description of Artificial Sequence: Synthetic peptide
  MOD_RES (4)..(4): phosphorylated threonine
KSKTPLVARFFRKNWLRLTW

SEQ ID NO: 6682 - protein, 20 aa, Artificial Sequence
  Description of Artificial Sequence: Synthetic peptide
  MOD_RES (4)..(4): phosphorylated threonine
KSKTPLVAYFFRKNWLRLTW

SEQ ID NO: 6683 - protein, 20 aa, Artificial Sequence
  Description of Artificial Sequence: Synthetic peptide
  MOD_RES (2)..(2): phosphorylated serine
KSLVRLLLLFFRKNWLRLTW

SEQ ID NO: 6684 - protein, 21 aa, Artificial Sequence
  Description of Artificial Sequence: Synthetic peptide
  MOD_RES (4)..(4): phosphorylated serine
KSSSLGNLKKFFRKNWLRLTW

SEQ ID NO: 6685 - protein, 25 aa, Artificial Sequence
  Description of Artificial Sequence: Synthetic peptide
  MOD_RES (2)..(2): phosphorylated serine
KSVKALSSLHGDDQFFRKNWLRLTW

SEQ ID NO: 6686 - protein, 26 aa, Artificial Sequence
  Description of Artificial Sequence: Synthetic peptide
  MOD_RES (2)..(2): phosphorylated serine
KSVKALSSLHGDDQDFFRKNWLRLTW

SEQ ID NO: 6687 - protein, 30 aa, Artificial Sequence
  Description of Artificial Sequence: Synthetic polypeptide
  MOD_RES (2)..(2): phosphorylated serine
  MOD_RES (16)..(16): phosphorylated serine
KSVKALSSLHGDDQDSEDEFFRKNWLRLTW

SEQ ID NO: 6688 - protein, 30 aa, Artificial Sequence; identical to SEQ ID NO: 6687
  Description of Artificial Sequence: Synthetic polypeptide
  MOD_RES (16)..(16): phosphorylated serine

SEQ ID NO: 6689 - protein, 20 aa, Artificial Sequence
  Description of Artificial Sequence: Synthetic peptide
  MOD_RES (4)..(4): phosphorylated serine
KTDSRQERYFFRKNWLRLTW

SEQ ID NO: 6690 - protein, 20 aa, Artificial Sequence
  Description of Artificial Sequence: Synthetic peptide
  MOD_RES (4)..(4): phosphorylated serine
KTESRQERYFFRKNWLRLTW

SEQ ID NO: 6691 - protein, 23 aa, Artificial Sequence
  Description of Artificial Sequence: Synthetic peptide
  MOD_RES (2)..(2): phosphorylated threonine
KTLSPGKNGVVKFFRKNWLRLTW

SEQ ID NO: 6692 - protein, 23 aa, Artificial Sequence
  Description of Artificial Sequence: Synthetic peptide
  MOD_RES (2)..(2): phosphorylated threonine
KTLSPGKNGVVYFFRKNWLRLTW

SEQ ID NO: 6693 - protein, 20 aa, Artificial Sequence
  Description of Artificial Sequence: Synthetic peptide
  MOD_RES (4)..(4): phosphorylated serine
KTMSGTFLLFFRKNWLRLTW

SEQ ID NO: 6694 - protein, 21 aa, Artificial Sequence
  Description of Artificial Sequence: Synthetic peptide
  MOD_RES (4)..(4): phosphorylated serine
KTMSPSQMIMFFRKNWLRLTW

SEQ ID NO: 6695 - protein, 21 aa, Artificial Sequence
  Description of Artificial Sequence: Synthetic peptide
  MOD_RES (5)..(5): phosphorylated serine
KTPTSPLKMKFFRKNWLRLTW

SEQ ID NO: 6696 - protein, 21 aa, Artificial Sequence
  Description of Artificial Sequence: Synthetic peptide
  MOD_RES (5)..(5): phosphorylated serine
KTPTSPLKMYFFRKNWLRLTW

SEQ ID NO: 6697 - protein, 20 aa, Artificial Sequence
  Description of Artificial Sequence: Synthetic peptide
  MOD_RES (6)..(6): phosphorylated serine
KTWKGSIGLFFRKNWLRLTW

SEQ ID NO: 6698 - protein, 20 aa, Artificial Sequence
  Description of Artificial Sequence: Synthetic peptide
  MOD_RES (4)..(4): phosphorylated serine
KVASLLHQVFFRKNWLRLTW

SEQ ID NO: 6699 - protein, 19 aa, Artificial Sequence
  Description of Artificial Sequence: Synthetic peptide
  MOD_RES (4)..(4): phosphorylated serine
KVDSPVIFFFRKNWLRLTW

SEQ ID NO: 6700 - protein, 22 aa, Artificial Sequence
  Description of Artificial Sequence: Synthetic peptide
  MOD_RES (5)..(5): phosphorylated serine
KVHGSLARAGKFFRKNWLRLTW

SEQ ID NO: 6701 - protein, 22 aa, Artificial Sequence
  Description of Artificial Sequence: Synthetic peptide
  MOD_RES (5)..(5): phosphorylated serine
KVHGSLARAGYFFRKNWLRLTW

SEQ ID NO: 6702 - protein, 22 aa, Artificial Sequence
  Description of Artificial Sequence: Synthetic peptide
  MOD_RES (5)..(5): phosphorylated serine
KVKSSPLIEKKFFRKNWLRLTW

SEQ ID NO: 6703 - protein, 22 aa, Artificial Sequence
  Description of Artificial Sequence: Synthetic peptide
  MOD_RES (4)..(4): phosphorylated serine
KVKSSPLIEKLFFRKNWLRLTW

SEQ ID NO: 6704 - protein, 22 aa, Artificial Sequence
  Description of Artificial Sequence: Synthetic peptide
  MOD_RES (5)..(5): phosphorylated serine
KVKSSPLIEKLFFRKNWLRLTW

SEQ ID NO: 6705 - protein, 22 aa, Artificial Sequence
  Description of Artificial Sequence: Synthetic peptide
  MOD_RES (5)..(5): phosphorylated serine
KVKSSPLIEKYFFRKNWLRLTW

SEQ ID NO: 6706 - protein, 20 aa, Artificial Sequence
  Description of Artificial Sequence: Synthetic peptide
  MOD_RES (4)..(4): phosphorylated serine
KVLSKEFHLFFRKNWLRLTW

SEQ ID NO: 6707 - protein, 20 aa, Artificial Sequence
  Description of Artificial Sequence: Synthetic peptide
  MOD_RES (6)..(6): phosphorylated threonine
KVLSPTAAKFFRKNWLRLTW

SEQ ID NO: 6708 - protein, 20 aa, Artificial Sequence
  Description of Artificial Sequence: Synthetic peptide
  MOD_RES (4)..(4): phosphorylated serine
KVLSSLVTLFFRKNWLRLTW

SEQ ID NO: 6709 - protein, 21 aa, Artificial Sequence
  Description of Artificial Sequence: Synthetic peptide
  MOD_RES (4)..(4): phosphorylated serine
KVLSTEEMELFFRKNWLRLTW

SEQ ID NO: 6710 - protein, 21 aa, Artificial Sequence
  Description of Artificial Sequence: Synthetic peptide
  MOD_RES (5)..(5): phosphorylated threonine
KVLSTEEMELFFRKNWLRLTW

SEQ ID NO: 6711 - protein, 20 aa, Artificial Sequence
  Description of Artificial Sequence: Synthetic peptide
  MOD_RES (4)..(4): phosphorylated threonine
KVLTPIKEKFFRKNWLRLTW

SEQ ID NO: 6712 - protein, 20 aa, Artificial Sequence
  Description of Artificial Sequence: Synthetic peptide
  MOD_RES (4)..(4): phosphorylated threonine
KVLTPIKEKFFRKNWLRLTW

SEQ ID NO: 6713 - protein, 20 aa, Artificial Sequence
  Description of Artificial Sequence: Synthetic peptide
  MOD_RES (4)..(4): phosphorylated threonine
KVLTPIKEYFFRKNWLRLTW

SEQ ID NO: 6714 - protein, 21 aa, Artificial Sequence
  Description of Artificial Sequence: Synthetic peptide
  MOD_RES (5)..(5): phosphorylated serine
KVPDSPALAKFFRKNWLRLTW

SEQ ID NO: 6715 - protein, 22 aa, Artificial Sequence
  Description of Artificial Sequence: Synthetic peptide
  MOD_RES (5)..(5): phosphorylated serine
KVPDSPALAKKFFRKNWLRLTW

SEQ ID NO: 6716 - protein, 22 aa, Artificial Sequence
  Description of Artificial Sequence: Synthetic peptide
  MOD_RES (5)..(5): phosphorylated serine
KVPDSPALAKYFFRKNWLRLTW

SEQ ID NO: 6717 - protein, 21 aa, Artificial Sequence
  Description of Artificial Sequence: Synthetic peptide
  MOD_RES (5)..(5): phosphorylated serine
KVPDSPALAYFFRKNWLRLTW

SEQ ID NO: 6718 - protein, 21 aa, Artificial Sequence
  Description of Artificial Sequence: Synthetic peptide
  MOD_RES (5)..(5): phosphorylated serine
KVPTSPLKMYFFRKNWLRLTW

SEQ ID NO: 6719 - protein, 20 aa, Artificial Sequence
  Description of Artificial Sequence: Synthetic peptide
  MOD_RES (4)..(4): phosphorylated serine
KVQSLRRALFFRKNWLRLTW

SEQ ID NO: 6720 - protein, 20 aa, Artificial Sequence
  Description of Artificial Sequence: Synthetic peptide
  MOD_RES (5)..(5): phosphorylated threonine
KVQVTSLSVFFRKNWLRLTW

SEQ ID NO: 6721 - protein, 20 aa, Artificial Sequence
  Description of Artificial Sequence: Synthetic peptide
  MOD_RES (4)..(4): phosphorylated serine
KVYSSSEFLFFRKNWLRLTW

SEQ ID NO: 6722 - protein, 20 aa, Artificial Sequence
  Description of Artificial Sequence: Synthetic peptide
  MOD_RES (4)..(4): phosphorylated serine
KYISGPHELFFRKNWLRLTW

SEQ ID NO: 6723 - protein, 21 aa, Artificial Sequence
  Description of Artificial Sequence: Synthetic peptide
  MOD_RES (3)..(3): phosphorylated serine
KYSPGKLRGNFFRKNWLRLTW

SEQ ID NO: 6724 - protein, 36 aa, Artificial Sequence
  Description of Artificial Sequence: Synthetic polypeptide
  MOD_RES (18)..(18): phosphorylated serine
LGGGGAGLSGRASGGAQSPLRYLHVFFRKNWLRLTW

SEQ ID NO: 6725 - protein, 20 aa, Artificial Sequence
  Description of Artificial Sequence: Synthetic peptide
  MOD_RES (4)..(4): phosphorylated serine
LKLSYLTWVFFRKNWLRLTW

SEQ ID NO: 6726 - protein, 21 aa, Artificial Sequence
  Description of Artificial Sequence: Synthetic peptide
  MOD_RES (4)..(4): phosphorylated serine
LLASPGHISVFFRKNWLRLTW

SEQ ID NO: 6727 - protein, 21 aa, Artificial Sequence
  Description of Artificial Sequence: Synthetic peptide
  MOD_RES (9)..(9): phosphorylated serine
LLDPSRSYSYFFRKNWLRLTW

SEQ ID NO: 6728 - protein, 21 aa, Artificial Sequence
  Description of Artificial Sequence: Synthetic peptide
  MOD_RES (4)..(4): phosphorylated threonine
LLDTPVKTQYFFRKNWLRLTW

SEQ ID NO: 6729 - protein, 20 aa, Artificial Sequence
  Description of Artificial Sequence: Synthetic peptide
  MOD_RES (4)..(4): phosphorylated serine
LLFSPVTSLFFRKNWLRLTW

SEQ ID NO: 6730 - protein, 20 aa, Artificial Sequence
  Description of Artificial Sequence: Synthetic peptide
  MOD_RES (4)..(4): phosphorylated serine
LLFSPVTSVFFRKNWLRLTW

SEQ ID NO: 6731 - protein, 20 aa, Artificial Sequence
  Description of Artificial Sequence: Synthetic peptide
  MOD_RES (4)..(4): phosphorylated serine
LLLSEEVELFFRKNWLRLTW

SEQ ID NO: 6732 - protein, 20 aa, Artificial Sequence
  Description of Artificial Sequence: Synthetic peptide
  MOD_RES (6)..(6): phosphorylated serine
LLNKSSPVKFFRKNWLRLTW

SEQ ID NO: 6733 - protein, 21 aa, Artificial Sequence
  Description of Artificial Sequence: Synthetic peptide
  MOD_RES (6)..(6): phosphorylated serine
LLNKSSPVKKFFRKNWLRLTW

SEQ ID NO: 6734 - protein, 21 aa, Artificial Sequence
  Description of Artificial Sequence: Synthetic peptide
  MOD_RES (6)..(6): phosphorylated serine
LLNKSSPVKYFFRKNWLRLTW

SEQ ID NO: 6735 - protein, 20 aa, Artificial Sequence
  Description of Artificial Sequence: Synthetic peptide
  MOD_RES (4)..(4): phosphorylated serine
LMFSPVTSLFFRKNWLRLTW

SEQ ID NO: 6736 - protein, 20 aa, Artificial Sequence
  Description of Artificial Sequence: Synthetic peptide
  MOD_RES (4)..(4): phosphorylated serine
LMFSPVTSVFFRKNWLRLTW

SEQ ID NO: 6737 - protein, 19 aa, Artificial Sequence
  Description of Artificial Sequence: Synthetic peptide
  MOD_RES (4)..(4): phosphorylated serine
LMFSVTSIFFRKNWLRLTW

SEQ ID NO: 6738 - protein, 19 aa, Artificial Sequence
  Description of Artificial Sequence: Synthetic peptide
  MOD_RES (4)..(4): phosphorylated serine
LMFSVTSLFFRKNWLRLTW

SEQ ID NO: 6739 - protein, 20 aa, Artificial Sequence
  Description of Artificial Sequence: Synthetic peptide
  MOD_RES (6)..(6): phosphorylated serine
LMNKSSPVKFFRKNWLRLTW

SEQ ID NO: 6740 - protein, 21 aa, Artificial Sequence
  Description of Artificial Sequence: Synthetic peptide
  MOD_RES (6)..(6): phosphorylated serine
LMNKSSPVKKFFRKNWLRLTW

SEQ ID NO: 6741 - protein, 21 aa, Artificial Sequence
  Description of Artificial Sequence: Synthetic peptide
  MOD_RES (6)..(6): phosphorylated serine
LMNKSSPVKYFFRKNWLRLTW

SEQ ID NO: 6742 - protein, 19 aa, Artificial Sequence
  Description of Artificial Sequence: Synthetic peptide
  MOD_RES (4)..(4): phosphorylated serine
LPASPHQFFFRKNWLRLTW

SEQ ID NO: 6743 - protein, 19 aa, Artificial Sequence
  Description of Artificial Sequence: Synthetic peptide
  MOD_RES (4)..(4): phosphorylated serine
LPASPHQLFFRKNWLRLTW

SEQ ID NO: 6744 - protein, 19 aa, Artificial Sequence
  Description of Artificial Sequence: Synthetic peptide
  MOD_RES (4)..(4): phosphorylated serine
LPASPHQMFFRKNWLRLTW

SEQ ID NO: 6745 - protein, 19 aa, Artificial Sequence
  Description of Artificial Sequence: Synthetic peptide
  MOD_RES (4)..(4): phosphorylated serine
LPASPHQVFFRKNWLRLTW

SEQ ID NO: 6746 - protein, 20 aa, Artificial Sequence
  Description of Artificial Sequence: Synthetic peptide
  MOD_RES (4)..(4): phosphorylated serine
LPASPRARFFFRKNWLRLTW

SEQ ID NO: 6747 - protein, 20 aa, Artificial Sequence
  Description of Artificial Sequence: Synthetic peptide
  MOD_RES (4)..(4): phosphorylated serine
LPASPRARLFFRKNWLRLTW

SEQ ID NO: 6748 - protein, 20 aa, Artificial Sequence
  Description of Artificial Sequence: Synthetic peptide
  MOD_RES (4)..(4): phosphorylated serine
LPASPRARMFFRKNWLRLTW

SEQ ID NO: 6749 - protein, 20 aa, Artificial Sequence
  Description of Artificial Sequence: Synthetic peptide
  MOD_RES (4)..(4): phosphorylated serine
LPASPRARVFFRKNWLRLTW

SEQ ID NO: 6750 - protein, 20 aa, Artificial Sequence
  Description of Artificial Sequence: Synthetic peptide
  MOD_RES (8)..(8): phosphorylated serine
LPIFSRLSFFFRKNWLRLTW

SEQ ID NO: 6751 - protein, 20 aa, Artificial Sequence
  Description of Artificial Sequence: Synthetic peptide
  MOD_RES (8)..(8): phosphorylated serine
LPIFSRLSIFFRKNWLRLTW

SEQ ID NO: 6752 - protein, 20 aa, Artificial Sequence
  Description of Artificial Sequence: Synthetic peptide
  MOD_RES (8)..(8): phosphorylated serine
LPIFSRLSLFFRKNWLRLTW

SEQ ID NO: 6753 - protein, 20 aa, Artificial Sequence
  Description of Artificial Sequence: Synthetic peptide
  MOD_RES (8)..(8): phosphorylated serine
LPIFSRLSMFFRKNWLRLTW

SEQ ID NO: 6754 - protein, 20 aa, Artificial Sequence
  Description of Artificial Sequence: Synthetic peptide
  MOD_RES (8)..(8): phosphorylated serine
LPIFSRLSVFFRKNWLRLTW

SEQ ID NO: 6755 - protein, 20 aa, Artificial Sequence
  Description of Artificial Sequence: Synthetic peptide
  MOD_RES (6)..(6): phosphorylated serine
LPKGLSASLFFRKNWLRLTW

SEQ ID NO: 6756 - protein, 20 aa, Artificial Sequence
  Description of Artificial Sequence: Synthetic peptide
  MOD_RES (8)..(8): phosphorylated serine
LPKGLSASLFFRKNWLRLTW

SEQ ID NO: 6757 - protein, 21 aa, Artificial Sequence
  Description of Artificial Sequence: Synthetic peptide
  MOD_RES (4)..(4): phosphorylated serine
LPKSPPYTAFFFRKNWLRLTW

SEQ ID NO: 6758 - protein, 21 aa, Artificial Sequence
  Description of Artificial Sequence: Synthetic peptide
  MOD_RES (4)..(4): phosphorylated serine
LPKSPPYTALFFRKNWLRLTW

SEQ ID NO: 6759 - protein, 21 aa, Artificial Sequence
  Description of Artificial Sequence: Synthetic peptide
  MOD_RES (4)..(4): phosphorylated serine
LPKSPPYTAMFFRKNWLRLTW

SEQ ID NO: 6760 - protein, 21 aa, Artificial Sequence
  Description of Artificial Sequence: Synthetic peptide
  MOD_RES (4)..(4): phosphorylated serine
LPKSPPYTAVFFRKNWLRLTW

SEQ ID NO: 6761 - protein, 21 aa, Artificial Sequence
  Description of Artificial Sequence: Synthetic peptide
  MOD_RES (6)..(6): phosphorylated serine
LPRGSSPSVFFFRKNWLRLTW

SEQ ID NO: 6762 - protein, 21 aa, Artificial Sequence
  Description of Artificial Sequence: Synthetic peptide
  MOD_RES (5)..(5): phosphorylated serine
LPRGSSPSVLFFRKNWLRLTW

SEQ ID NO: 6763 - protein, 21 aa, Artificial Sequence
  Description of Artificial Sequence: Synthetic peptide
  MOD_RES (6)..(6): phosphorylated serine
LPRGSSPSVLFFRKNWLRLTW

SEQ ID NO: 6764 - protein, 21 aa, Artificial Sequence
  Description of Artificial Sequence: Synthetic peptide
  MOD_RES (6)..(6): phosphorylated serine
LPRGSSPSVMFFRKNWLRLTW

SEQ ID NO: 6765 - protein, 21 aa, Artificial Sequence
  Description of Artificial Sequence: Synthetic peptide
  MOD_RES (6)..(6): phosphorylated serine
LPRGSSPSVVFFRKNWLRLTW

SEQ ID NO: 6766 - protein, 21 aa, Artificial Sequence
  Description of Artificial Sequence: Synthetic peptide
  MOD_RES (4)..(4): oxidized methionine
  MOD_RES (6)..(6): phosphorylated serine
LPRMISHSELFFRKNWLRLTW

SEQ ID NO: 6767 - protein, 21 aa, Artificial Sequence
  Description of Artificial Sequence: Synthetic peptide
  MOD_RES (6)..(6): phosphorylated serine
LPRMISHSELFFRKNWLRLTW

SEQ ID NO: 6768 - protein, 20 aa, Artificial Sequence
  Description of Artificial Sequence: Synthetic peptide
  MOD_RES (6)..(6): phosphorylated serine
LPRPASPALFFRKNWLRLTW

SEQ ID NO: 6769 - protein, 20 aa, Artificial Sequence
  Description of Artificial Sequence: Synthetic peptide
  MOD_RES (6)..(6): phosphorylated serine
LPRSSSMAAFFRKNWLRLTW

SEQ ID NO: 6770 - protein, 22 aa, Artificial Sequence
  Description of Artificial Sequence: Synthetic peptide
  MOD_RES (6)..(6): phosphorylated serine
LPRSSSMAAGLFFRKNWLRLTW

SEQ ID NO: 6771 - protein, 20 aa, Artificial Sequence
  Description of Artificial Sequence: Synthetic peptide
  MOD_RES (4)..(4): phosphorylated threonine
LPRTPRPELFFRKNWLRLTW

SEQ ID NO: 6772 - protein, 20 aa, Artificial Sequence
  Description of Artificial Sequence: Synthetic peptide
  MOD_RES (4)..(4): phosphorylated serine
LPVSPRLQLFFRKNWLRLTW

SEQ ID NO: 6773 - protein, 22 aa, Artificial Sequence
  Description of Artificial Sequence: Synthetic peptide
  MOD_RES (4)..(4): phosphorylated serine
LQLSPLKGLSLFFRKNWLRLTW

SEQ ID NO: 6774 - protein, 20 aa, Artificial Sequence
  Description of Artificial Sequence: Synthetic peptide
  MOD_RES (5)..(5): phosphorylated threonine
LQNITENQLFFRKNWLRLTW

SEQ ID NO: 6775 - protein, 21 aa, Artificial Sequence
  Description of Artificial Sequence: Synthetic peptide
  MOD_RES (9)..(9): phosphorylated serine
LSDPSRSYSYFFRKNWLRLTW

SEQ ID NO: 6776 - protein, 21 aa, Artificial Sequence
  Description of Artificial Sequence: Synthetic peptide
  MOD_RES (4)..(4): phosphorylated serine
LSDSDTEAKLFFRKNWLRLTW

SEQ ID NO: 6777 - protein, 21 aa, Artificial Sequence
  Description of Artificial Sequence: Synthetic peptide
  MOD_RES (4)..(4): phosphorylated serine
LSDSDTEAKYFFRKNWLRLTW

SEQ ID NO: 6778 - protein, 21 aa, Artificial Sequence
  Description of Artificial Sequence: Synthetic peptide
  MOD_RES (4)..(4): phosphorylated threonine
LSDTPVKTQYFFRKNWLRLTW

SEQ ID NO: 6779 - protein, 21 aa, Artificial Sequence
  Description of Artificial Sequence: Synthetic peptide
  MOD_RES (9)..(9): phosphorylated serine
LSEPSRSYSYFFRKNWLRLTW

SEQ ID NO: 6780 - protein, 21 aa, Artificial Sequence
  Description of Artificial Sequence: Synthetic peptide
  MOD_RES (4)..(4): phosphorylated serine
LSESDTEAKLFFRKNWLRLTW

SEQ ID NO: 6781 - protein, 21 aa, Artificial Sequence
  Description of Artificial Sequence: Synthetic peptide
  MOD_RES (4)..(4): phosphorylated serine
LSESDTEAKYFFRKNWLRLTW

SEQ ID NO: 6782 - protein, 21 aa, Artificial Sequence
  Description of Artificial Sequence: Synthetic peptide
  MOD_RES (4)..(4): phosphorylated threonine
LSETPVKTQYFFRKNWLRLTW

SEQ ID NO: 6783 - protein, 29 aa, Artificial Sequence
  Description of Artificial Sequence: Synthetic peptide
  MOD_RES (15)..(15): phosphorylated serine
LSKFRMPQPSSGRESPRHFFRKNWLRLTW

SEQ ID NO: 6784 - protein, 20 aa, Artificial Sequence
  Description of Artificial Sequence: Synthetic peptide
  MOD_RES (4)..(4): phosphorylated serine
LSSSVIRELFFRKNWLRLTW

SEQ ID NO: 6785 - protein, 21 aa, Artificial Sequence
  Description of Artificial Sequence: Synthetic peptide
  MOD_RES (9)..(9): phosphorylated serine
LTDPSRSYSYFFRKNWLRLTW

SEQ ID NO: 6786 - protein, 23 aa, Artificial Sequence
  Description of Artificial Sequence: Synthetic peptide
  MOD_RES (6)..(6): phosphorylated serine
LTDPSSPTISSYFFRKNWLRLTW

SEQ ID NO: 6787 - protein, 21 aa, Artificial Sequence
  Description of Artificial Sequence: Synthetic peptide
  MOD_RES (4)..(4): phosphorylated serine
LTDSDTEAKLFFRKNWLRLTW

SEQ ID NO: 6788 - protein, 21 aa, Artificial Sequence
  Description of Artificial Sequence: Synthetic peptide
  MOD_RES (4)..(4): phosphorylated serine
LTDSDTEAKYFFRKNWLRLTW

SEQ ID NO: 6789 - protein, 21 aa, Artificial Sequence
  Description of Artificial Sequence: Synthetic peptide
  MOD_RES (4)..(4): phosphorylated threonine
LTDTPVKTQYFFRKNWLRLTW

SEQ ID NO: 6790 - protein, 21 aa, Artificial Sequence
  Description of Artificial Sequence: Synthetic peptide
  MOD_RES (9)..(9): phosphorylated serine
LTEPSRSYSYFFRKNWLRLTW

SEQ ID NO: 6791 - protein, 21 aa, Artificial Sequence
  Description of Artificial Sequence: Synthetic peptide
  MOD_RES (4)..(4): phosphorylated serine
LTESDTEAKLFFRKNWLRLTW

SEQ ID NO: 6792 - protein, 21 aa, Artificial Sequence
  Description of Artificial Sequence: Synthetic peptide
  MOD_RES (4)..(4): phosphorylated serine
LTESDTEAKYFFRKNWLRLTW

SEQ ID NO: 6793 - protein, 21 aa, Artificial Sequence
  Description of Artificial Sequence: Synthetic peptide
  MOD_RES (4)..(4): phosphorylated threonine
LTETPVKTQYFFRKNWLRLTW

SEQ ID NO: 6794 - protein, 21 aa, Artificial Sequence
  Description of Artificial Sequence: Synthetic peptide
  MOD_RES (4)..(4): phosphorylated threonine
LTETPVKTQYFFRKNWLRLTW

SEQ ID NO: 6795 - protein, 22 aa, Artificial Sequence
  Description of Artificial Sequence: Synthetic peptide
  MOD_RES (5)..(5): phosphorylated serine
MLAESPSVPRLFFRKNWLRLTW

SEQ ID NO: 6796 - protein, 22 aa, Artificial Sequence
  Description of Artificial Sequence: Synthetic peptide
  MOD_RES (5)..(5): phosphorylated serine
MLAESPSVPRVFFRKNWLRLTW

SEQ ID NO: 6797 - protein, 21 aa, Artificial Sequence
  Description of Artificial Sequence: Synthetic peptide
  MOD_RES (4)..(4): phosphorylated serine
MLRSPPRVSKFFRKNWLRLTW

SEQ ID NO: 6798 - protein, 21 aa, Artificial Sequence
  Description of Artificial Sequence: Synthetic peptide
  MOD_RES (4)..(4): phosphorylated serine
MMRSPPRVSKFFRKNWLRLTW

SEQ ID NO: 6799 - protein, 28 aa, Artificial Sequence
  Description of Artificial Sequence: Synthetic peptide
  MOD_RES (5)..(5): phosphorylated serine
MPRPSIKKAQNSQAARQFFRKNWLRLTW

SEQ ID NO: 6800 - protein, 21 aa, Artificial Sequence
  Description of Artificial Sequence: Synthetic peptide
  MOD_RES (6)..(6): phosphorylated serine
MPRQPSAIRMFFRKNWLRLTW

SEQ ID NO: 6801 - protein, 21 aa, Artificial Sequence
  Description of Artificial Sequence: Synthetic peptide
  MOD_RES (6)..(6): phosphorylated serine
MPRQPSATRFFFRKNWLRLTW

SEQ ID NO: 6802 - protein, 21 aa, Artificial Sequence
  Description of Artificial Sequence: Synthetic peptide
  MOD_RES (6)..(6): phosphorylated serine
MPRQPSATRLFFRKNWLRLTW

SEQ ID NO: 6803 - protein, 21 aa, Artificial Sequence
  Description of Artificial Sequence: Synthetic peptide
  MOD_RES (6)..(6): phosphorylated serine
MPRQPSATRMFFRKNWLRLTW

SEQ ID NO: 6804 - protein, 21 aa, Artificial Sequence
  Description of Artificial Sequence: Synthetic peptide
  MOD_RES (6)..(6): phosphorylated serine
MPRQPSATRVFFRKNWLRLTW

SEQ ID NO: 6805 - protein, 20 aa, Artificial Sequence
  Description of Artificial Sequence: Synthetic peptide
  MOD_RES (4)..(4): phosphorylated serine
MRLSEWLQLFFRKNWLRLTW

SEQ ID NO: 6806 - protein, 20 aa, Artificial Sequence
  Description of Artificial Sequence: Synthetic peptide
  MOD_RES (4)..(4): phosphorylated serine
MRLSRELQFFFRKNWLRLTW

SEQ ID NO: 6807 - protein, 20 aa, Artificial Sequence
  Description of Artificial Sequence: Synthetic peptide
  MOD_RES (4)..(4): phosphorylated serine
MRLSRELQKFFRKNWLRLTW

SEQ ID NO: 6808 - protein, 20 aa, Artificial Sequence
  Description of Artificial Sequence: Synthetic peptide
  MOD_RES (4)..(4): phosphorylated serine
MRLSRELQLFFRKNWLRLTW

SEQ ID NO: 6809 - protein, 20 aa, Artificial Sequence
  Description of Artificial Sequence: Synthetic peptide
  MOD_RES (4)..(4): phosphorylated serine
MRLSRELQMFFRKNWLRLTW

SEQ ID NO: 6810 - protein, 20 aa, Artificial Sequence
  Description of Artificial Sequence: Synthetic peptide
  MOD_RES (4)..(4): phosphorylated serine
MRLSRELQRFFRKNWLRLTW

SEQ ID NO: 6811 - protein, 20 aa, Artificial Sequence
  Description of Artificial Sequence: Synthetic peptide
  MOD_RES (4)..(4): phosphorylated serine
MRLSRELQYFFRKNWLRLTW

SEQ ID NO: 6812 - protein, 20 aa, Artificial Sequence
  Description of Artificial Sequence: Synthetic peptide
  MOD_RES (4)..(4): phosphorylated threonine
MSDTYRLKYFFRKNWLRLTW

SEQ ID NO: 6813 - protein, 20 aa, Artificial Sequence
  Description of Artificial Sequence: Synthetic peptide
  MOD_RES (4)..(4): phosphorylated threonine
MSETYRLKYFFRKNWLRLTW

SEQ ID NO: 6814 - protein, 20 aa, Artificial Sequence
  Description of Artificial Sequence: Synthetic peptide
  MOD_RES (4)..(4): phosphorylated threonine
MTDTYRLKYFFRKNWLRLTW

SEQ ID NO: 6815 - protein, 20 aa, Artificial Sequence
  Description of Artificial Sequence: Synthetic peptide
  MOD_RES (4)..(4): phosphorylated threonine
MTETYRLKYFFRKNWLRLTW

SEQ ID NO: 6816 - protein, 21 aa, Artificial Sequence
  Description of Artificial Sequence: Synthetic peptide
  MOD_RES (4)..(4): phosphorylated serine
MTRSPPRVSKFFRKNWLRLTW

SEQ ID NO: 6817 - protein, 21 aa, Artificial Sequence
  Description of Artificial Sequence: Synthetic peptide
  MOD_RES (4)..(4): phosphorylated serine
MTRSPPRVSYFFRKNWLRLTW

SEQ ID NO: 6818 - protein, 23 aa, Artificial Sequence
  Description of Artificial Sequence: Synthetic peptide
  MOD_RES (10)..(10): phosphorylated serine
NAPPAYEKLSAEFFRKNWLRLTW

SEQ ID NO: 6819 - protein, 21 aa, Artificial Sequence
  Description of Artificial Sequence: Synthetic peptide
  MOD_RES (4)..(4): phosphorylated serine
NFKSPVKTIRFFRKNWLRLTW

SEQ ID NO: 6820 - protein, 32 aa, Artificial Sequence
  Description of Artificial Sequence: Synthetic polypeptide
  MOD_RES (18)..(18): phosphorylated serine
NLELSKFRMPQPSSGRESPRHFFRKNWLRLTW

SEQ ID NO: 6821 - protein, 22 aa, Artificial Sequence
  Description of Artificial Sequence: Synthetic peptide
  MOD_RES (4)..(4): phosphorylated serine
NLGSRNHVHQLFFRKNWLRLTW

SEQ ID NO: 6822 - protein, 23 aa, Artificial Sequence
  Description of Artificial Sequence: Synthetic peptide
  MOD_RES (4)..(4): phosphorylated serine
NLLSPDGKMISVFFRKNWLRLTW

SEQ ID NO: 6823 - protein, 20 aa, Artificial Sequence
  Description of Artificial Sequence: Synthetic peptide
  MOD_RES (8)..(8): phosphorylated serine
NLVERKNSKFFRKNWLRLTW

SEQ ID NO: 6824 - protein, 20 aa, Artificial Sequence
  Description of Artificial Sequence: Synthetic peptide
  MOD_RES (8)..(8): phosphorylated serine
NLVERKNSLFFRKNWLRLTW

SEQ ID NO: 6825 - protein, 20 aa, Artificial Sequence
  Description of Artificial Sequence: Synthetic peptide
  MOD_RES (4)..(4): phosphorylated serine
NMDSPGPMLFFRKNWLRLTW

SEQ ID NO: 6826 - protein, 20 aa, Artificial Sequence
  Description of Artificial Sequence: Synthetic peptide
  MOD_RES (8)..(8): phosphorylated serine
NMVERKNSKFFRKNWLRLTW

SEQ ID NO: 6827 - protein, 20 aa, Artificial Sequence
  Description of Artificial Sequence: Synthetic peptide
  MOD_RES (8)..(8): phosphorylated serine
NMVERKNSLFFRKNWLRLTW

SEQ ID NO: 6828 - protein, 24 aa, Artificial Sequence
  Description of Artificial Sequence: Synthetic peptide
  MOD_RES (8)..(8): phosphorylated serine
NRAMRRVSSVPSRFFRKNWLRLTW

SEQ ID NO: 6829 - protein, 26 aa, Artificial Sequence
  Description of Artificial Sequence: Synthetic peptide
  MOD_RES (8)..(8): phosphorylated serine
NRAMRRVSSVPSRAQFFRKNWLRLTW

SEQ ID NO: 6830 - protein, 24 aa, Artificial Sequence
  Description of Artificial Sequence: Synthetic peptide
  MOD_RES (3)..(3): phosphorylated serine
NRSWKYNQSISLRFFRKNWLRLTW

SEQ ID NO: 6831 - protein, 26 aa, Artificial Sequence
  Description of Artificial Sequence: Synthetic peptide
  MOD_RES (3)..(3): phosphorylated serine
NRSWKYNQSISLRRPFFRKNWLRLTW

SEQ ID NO: 6832 - protein, 21 aa, Artificial Sequence
  Description of Artificial Sequence: Synthetic peptide
  MOD_RES (4)..(4): phosphorylated threonine
NRYTNRVVTFFFRKNWLRLTW

SEQ ID NO: 6833 - protein, 21 aa, Artificial Sequence
  Description of Artificial Sequence: Synthetic peptide
  MOD_RES (4)..(4): phosphorylated threonine
NRYTNRVVTKFFRKNWLRLTW

SEQ ID NO: 6834 - protein, 21 aa, Artificial Sequence
  Description of Artificial Sequence: Synthetic peptide
  MOD_RES (4)..(4): phosphorylated threonine
NRYTNRVVTLFFRKNWLRLTW

SEQ ID NO: 6835 - protein, 21 aa, Artificial Sequence
  Description of Artificial Sequence: Synthetic peptide
  MOD_RES (4)..(4): phosphorylated threonine
NRYTNRVVTMFFRKNWLRLTW

SEQ ID NO: 6836 - protein, 21 aa, Artificial Sequence
  Description of Artificial Sequence: Synthetic peptide
  MOD_RES (4)..(4): phosphorylated threonine
NRYTNRVVTRFFRKNWLRLTW

SEQ ID NO: 6837 - protein, 21 aa, Artificial Sequence
  Description of Artificial Sequence: Synthetic peptide
  MOD_RES (4)..(4): phosphorylated threonine
NRYTNRVVTYFFRKNWLRLTW

SEQ ID NO: 6838 - protein, 19 aa, Artificial Sequence
  Description of Artificial Sequence: Synthetic peptide
  MOD_RES (4)..(4): phosphorylated serine
NSDSPLRYFFRKNWLRLTW

SEQ ID NO: 6839 - protein, 19 aa, Artificial Sequence
  Description of Artificial Sequence: Synthetic peptide
  MOD_RES (4)..(4): phosphorylated serine
NSESPLRYFFRKNWLRLTW

SEQ ID NO: 6840 - protein, 19 aa, Artificial Sequence
  Description of Artificial Sequence: Synthetic peptide
  MOD_RES (4)..(4): phosphorylated serine
NTDSPLRYFFRKNWLRLTW

SEQ ID NO: 6841 - protein, 19 aa, Artificial Sequence
  Description of Artificial Sequence: Synthetic peptide
  MOD_RES (4)..(4): phosphorylated serine
NTESPLRYFFRKNWLRLTW

SEQ ID NO: 6842 - protein, 20 aa, Artificial Sequence
  Description of Artificial Sequence: Synthetic peptide
  MOD_RES (8)..(8): phosphorylated serine
NYVERKNSKFFRKNWLRLTW

SEQ ID NO: 6843 - protein, 20 aa, Artificial Sequence
  Description of Artificial Sequence: Synthetic peptide
  MOD_RES (8)..(8): phosphorylated serine
NYVERKNSLFFRKNWLRLTW

SEQ ID NO: 6844 - protein, 20 aa, Artificial Sequence
  Description of Artificial Sequence: Synthetic peptide
  MOD_RES (8)..(8): phosphorylated serine
NYVERKNSYFFRKNWLRLTW

SEQ ID NO: 6845 - protein, 20 aa, Artificial Sequence
  Description of Artificial Sequence: Synthetic peptide
  MOD_RES (4)..(4): phosphorylated serine
PARSPVTEIFFRKNWLRLTW

SEQ ID NO: 6846 - protein, 20 aa, Artificial Sequence
  Description of Artificial Sequence: Synthetic peptide
  MOD_RES (7)..(7): phosphorylated serine
PAYEKLSAEFFRKNWLRLTW

SEQ ID NO: 6847 - protein, 23 aa, Artificial Sequence
  Description of Artificial Sequence: Synthetic peptide
  MOD_RES (7)..(7): phosphorylated serine
PAYEKLSAEQSPFFRKNWLRLTW

SEQ ID NO: 6848 - protein, 20 aa, Artificial Sequence
  Description of Artificial Sequence: Synthetic peptide
  MOD_RES (2)..(2): oxidized methionine
  MOD_RES (6)..(6): phosphorylated serine
PMVTLSLNLFFRKNWLRLTW

SEQ ID NO: 6849 - protein, 20 aa, Artificial Sequence
  Description of Artificial Sequence: Synthetic peptide
  MOD_RES (6)..(6): phosphorylated serine
PMVTLSLNLFFRKNWLRLTW

SEQ ID NO: 6850 - protein, 23 aa, Artificial Sequence
  Description of Artificial Sequence: Synthetic peptide
  MOD_RES (11)..(11): phosphorylated serine
PNAPPAYEKLSAFFRKNWLRLTW

SEQ ID NO: 6851 - protein, 20 aa, Artificial Sequence
  Description of Artificial Sequence: Synthetic peptide
  MOD_RES (8)..(8): phosphorylated serine
PPAYEKLSAFFRKNWLRLTW

SEQ ID NO: 6852 - protein, 23 aa, Artificial Sequence
  Description of Artificial Sequence: Synthetic peptide
  MOD_RES (8)..(8): phosphorylated serine
PPAYEKLSAEQSFFRKNWLRLTW

SEQ ID NO: 6853 - protein, 32 aa, Artificial Sequence
  Description of Artificial Sequence: Synthetic polypeptide
  MOD_RES (18)..(18): phosphorylated serine
PPLPEDSIKVIRNMRAASPPAFFRKNWLRLTW

SEQ ID NO: 6854 - protein, 22 aa, Artificial Sequence
  Description of Artificial Sequence: Synthetic peptide
  MOD_RES (8)..(8): phosphorylated serine
PYDPALGSPSRFFRKNWLRLTW

SEQ ID NO: 6855 - protein, 25 aa, Artificial Sequence
  Description of Artificial Sequence: Synthetic peptide
  MOD_RES (8)..(8): phosphorylated serine
QAASNFKSPVKTIRFFRKNWLRLTW

SEQ ID NO: 6856 - protein, 21 aa, Artificial Sequence
  Description of Artificial Sequence: Synthetic peptide
  MOD_RES (4)..(4): phosphorylated serine
QLDSPQRALYFFRKNWLRLTW

SEQ ID NO: 6857 - protein, 21 aa, Artificial Sequence
  Description of Artificial Sequence: Synthetic peptide
  MOD_RES (4)..(4): phosphorylated serine
QLESPQRALYFFRKNWLRLTW

SEQ ID NO: 6858 - protein, 21 aa, Artificial Sequence
  Description of Artificial Sequence: Synthetic peptide
  MOD_RES (4)..(4): phosphorylated serine
QLFSPKKGQKFFRKNWLRLTW

SEQ ID NO: 6859 - protein, 21 aa, Artificial Sequence
  Description of Artificial Sequence: Synthetic peptide
  MOD_RES (4)..(4): phosphorylated serine
QMFSPKKGQKFFRKNWLRLTW

SEQ ID NO: 6860 - protein, 20 aa, Artificial Sequence
  Description of Artificial Sequence: Synthetic peptide
  MOD_RES (6)..(6): phosphorylated serine
QPQRRSLRLFFRKNWLRLTW

SEQ ID NO: 6861 - protein, 22 aa, Artificial Sequence
  Description of Artificial Sequence: Synthetic peptide
  MOD_RES (4)..(4): phosphorylated serine
QPRSPGPDYSFFFRKNWLRLTW

SEQ ID NO: 6862 - protein, 22 aa, Artificial Sequence
  Description of Artificial Sequence: Synthetic peptide
  MOD_RES (4)..(4): phosphorylated serine
QPRSPGPDYSLFFRKNWLRLTW

SEQ ID NO: 6863 - protein, 22 aa, Artificial Sequence
  Description of Artificial Sequence: Synthetic peptide
  MOD_RES (4)..(4): phosphorylated serine
QPRSPGPDYSMFFRKNWLRLTW

SEQ ID NO: 6864 - protein, 22 aa, Artificial Sequence
  Description of Artificial Sequence: Synthetic peptide
  MOD_RES (4)..(4): phosphorylated serine
QPRSPGPDYSVFFRKNWLRLTW

SEQ ID NO: 6865 - protein, 21 aa, Artificial Sequence
  Description of Artificial Sequence: Synthetic peptide
  MOD_RES (4)..(4): phosphorylated threonine
  MOD_RES (6)..(6): phosphorylated serine
QPRTPSPLVFFFRKNWLRLTW

SEQ ID NO: 6866 - protein, 21 aa, Artificial Sequence
  Description of Artificial Sequence: Synthetic peptide
  MOD_RES (4)..(4): phosphorylated threonine
QPRTPSPLVFFFRKNWLRLTW

SEQ ID NO: 6867 - protein, 21 aa, Artificial Sequence
  Description of Artificial Sequence: Synthetic peptide
  MOD_RES (4)..(4): phosphorylated threonine
  MOD_RES (6)..(6): phosphorylated serine
QPRTPSPLVLFFRKNWLRLTW

SEQ ID NO: 6868 - protein, 21 aa, Artificial Sequence
  Description of Artificial Sequence: Synthetic peptide
  MOD_RES (4)..(4): phosphorylated threonine
QPRTPSPLVLFFRKNWLRLTW

SEQ ID NO: 6869 - protein, 21 aa, Artificial Sequence
  Description of Artificial Sequence: Synthetic peptide
  MOD_RES (4)..(4): phosphorylated threonine
  MOD_RES (6)..(6): phosphorylated serine
QPRTPSPLVMFFRKNWLRLTW

SEQ ID NO: 6870 - protein, 21 aa, Artificial Sequence
  Description of Artificial Sequence: Synthetic peptide
  MOD_RES (4)..(4): phosphorylated threonine
QPRTPSPLVMFFRKNWLRLTW

SEQ ID NO: 6871 - protein, 21 aa, Artificial Sequence
  Description of Artificial Sequence: Synthetic peptide
  MOD_RES (4)..(4): phosphorylated threonine
  MOD_RES (6)..(6): phosphorylated serine
QPRTPSPLVVFFRKNWLRLTW

SEQ ID NO: 6872 - protein, 21 aa, Artificial Sequence
  Description of Artificial Sequence: Synthetic peptide
  MOD_RES (4)..(4): phosphorylated threonine
QPRTPSPLVVFFRKNWLRLTW

SEQ ID NO: 6873 - protein, 21 aa, Artificial Sequence
  Description of Artificial Sequence: Synthetic peptide
  MOD_RES (6)..(6): phosphorylated serine
QPSFPSVLPAFFRKNWLRLTW

SEQ ID NO: 6874 - protein, 21 aa, Artificial Sequence
  Description of Artificial Sequence: Synthetic peptide
  MOD_RES (4)..(4): phosphorylated serine
QRLSPLSAAYFFRKNWLRLTW

SEQ ID NO: 6875 - protein, 21 aa, Artificial Sequence
  Description of Artificial Sequence: Synthetic peptide
  MOD_RES (4)..(4): phosphorylated serine
QSDSPQRALYFFRKNWLRLTW

SEQ ID NO: 6876 - protein, 21 aa, Artificial Sequence
  Description of Artificial Sequence: Synthetic peptide
  MOD_RES (4)..(4): phosphorylated serine
QSESPQRALYFFRKNWLRLTW

SEQ ID NO: 6877 - protein, 21 aa, Artificial Sequence
  Description of Artificial Sequence: Synthetic peptide
  MOD_RES (4)..(4): phosphorylated serine
QTDSPQRALYFFRKNWLRLTW

SEQ ID NO: 6878 - protein, 21 aa, Artificial Sequence
  Description of Artificial Sequence: Synthetic peptide
  MOD_RES (4)..(4): phosphorylated serine
QTESPQRALYFFRKNWLRLTW

SEQ ID NO: 6879 - protein, 39 aa, Artificial Sequence
  Description of Artificial Sequence: Synthetic polypeptide
  MOD_RES (14)..(14): phosphorylated serine
QVAMPVKKSPRRSSSDEQGLSYSSLKNVFFRKNWLRLTW

SEQ ID NO: 6880 - protein, 21 aa, Artificial Sequence
  Description of Artificial Sequence: Synthetic peptide
  MOD_RES (4)..(4): phosphorylated serine
QVFSPKKGQKFFRKNWLRLTW

SEQ ID NO: 6881 - protein, 21 aa, Artificial Sequence
  Description of Artificial Sequence: Synthetic peptide
  MOD_RES (4)..(4): phosphorylated serine
QVFSPKKGQYFFRKNWLRLTW

SEQ ID NO: 6882 - protein, 19 aa, Artificial Sequence
  Description of Artificial Sequence: Synthetic peptide
  MOD_RES (4)..(4): phosphorylated serine
RADSPVHMFFRKNWLRLTW

SEQ ID NO: 6883 - protein, 21 aa, Artificial Sequence
  Description of Artificial Sequence: Synthetic peptide
  MOD_RES (4)..(4): phosphorylated serine
RAFSFSKTPKFFRKNWLRLTW

SEQ ID NO: 6884 - protein, 21 aa, Artificial Sequence
  Description of Artificial Sequence: Synthetic peptide
  MOD_RES (4)..(4): phosphorylated serine
RAFSFSKTPYFFRKNWLRLTW

SEQ ID NO: 6885 - protein, 20 aa, Artificial Sequence
  Description of Artificial Sequence: Synthetic peptide
  MOD_RES (4)..(4): phosphorylated serine
RAFSVKFEVFFRKNWLRLTW

SEQ ID NO: 6886 - protein, 20 aa, Artificial Sequence
  Description of Artificial Sequence: Synthetic peptide
  MOD_RES (4)..(4): phosphorylated serine
RAHSEPLALFFRKNWLRLTW

SEQ ID NO: 6887 - protein, 20 aa, Artificial Sequence
  Description of Artificial Sequence: Synthetic peptide
  MOD_RES (4)..(4): phosphorylated serine
RAHSSPASLFFRKNWLRLTW

SEQ ID NO: 6888 - protein, 20 aa, Artificial Sequence
  Description of Artificial Sequence: Synthetic peptide
  MOD_RES (5)..(5): phosphorylated serine
RAHSSPASLFFRKNWLRLTW

SEQ ID NO: 6889 - protein, 20 aa, Artificial Sequence
  Description of Artificial Sequence: Synthetic peptide
  MOD_RES (4)..(4): phosphorylated serine
RAKSPISLKFFRKNWLRLTW

SEQ ID NO: 6890 - protein, 20 aa, Artificial Sequence
  Description of Artificial Sequence: Synthetic peptide
  MOD_RES (4)..(4): phosphorylated serine
RAKSPISLYFFRKNWLRLTW

SEQ ID NO: 6891 - protein, 20 aa, Artificial Sequence
  Description of Artificial Sequence: Synthetic peptide
  MOD_RES (4)..(4): phosphorylated serine
RAPSPSSRFFFRKNWLRLTW

SEQ ID NO: 6892 - protein, 20 aa, Artificial Sequence
  Description of Artificial Sequence: Synthetic peptide
  MOD_RES (4)..(4): phosphorylated serine
RAPSPSSRLFFRKNWLRLTW

SEQ ID NO: 6893 - protein, 20 aa, Artificial Sequence
  Description of Artificial Sequence: Synthetic peptide
  MOD_RES (4)..(4): phosphorylated serine
RAPSPSSRMFFRKNWLRLTW

SEQ ID NO: 6894 - protein, 20 aa, Artificial Sequence
  Description of Artificial Sequence: Synthetic peptide
  MOD_RES (4)..(4): phosphorylated serine
RAPSPSSRVFFRKNWLRLTW

SEQ ID NO: 6895 - protein, 21 aa, Artificial Sequence
  Description of Artificial Sequence: Synthetic peptide
  MOD_RES (6)..(6): phosphorylated serine
RARGISPIVFFFRKNWLRLTW

SEQ ID NO: 6896 - protein, 20 aa, Artificial Sequence
  Description of Artificial Sequence: Synthetic peptide
  MOD_RES (4)..(4): phosphorylated serine
  MOD_RES (8)..(8): phosphorylated serine
RASSDIVSLFFRKNWLRLTW

SEQ ID NO: 6897 - protein, 20 aa, Artificial Sequence
  Description of Artificial Sequence: Synthetic peptide
  MOD_RES (4)..(4): phosphorylated serine
RASSDIVSLFFRKNWLRLTW

SEQ ID NO: 6898 - protein, 20 aa, Artificial Sequence
  Description of Artificial Sequence: Synthetic peptide
  MOD_RES (4)..(4): phosphorylated serine
RASSLSITVFFRKNWLRLTW

SEQ ID NO: 6899 - protein, 20 aa, Artificial Sequence
  Description of Artificial Sequence: Synthetic peptide
  MOD_RES (5)..(5): phosphorylated serine
  MOD_RES (8)..(8): oxidized methionine
REAPSPLMIFFRKNWLRLTW

SEQ ID NO: 6900 - protein, 20 aa, Artificial Sequence
  Description of Artificial Sequence: Synthetic peptide
  MOD_RES (5)..(5): phosphorylated serine
REAPSPLMIFFRKNWLRLTW

SEQ ID NO: 6901 - protein, 20 aa, Artificial Sequence
  Description of Artificial Sequence: Synthetic peptide
  MOD_RES (4)..(4): phosphorylated serine
REASPAPLAFFRKNWLRLTW

SEQ ID NO: 6902 - protein, 20 aa, Artificial Sequence
  Description of Artificial Sequence: Synthetic peptide
  MOD_RES (4)..(4): phosphorylated serine
REASPRLRVFFRKNWLRLTW

SEQ ID NO: 6903 - protein, 21 aa, Artificial Sequence
  Description of Artificial Sequence: Synthetic peptide
  MOD_RES (4)..(4): phosphorylated serine
REASPSRLSVFFRKNWLRLTW

SEQ ID NO: 6904 - protein, 22 aa, Artificial Sequence
  Description of Artificial Sequence: Synthetic peptide
  MOD_RES (4)..(4): phosphorylated serine
REDSTPGKVFLFFRKNWLRLTW

SEQ ID NO: 6905 - protein, 21 aa, Artificial Sequence
  Description of Artificial Sequence: Synthetic peptide
  MOD_RES (6)..(6): phosphorylated threonine
REIMGTPEYLFFRKNWLRLTW

SEQ ID NO: 6906 - protein, 20 aa, Artificial Sequence
  Description of Artificial Sequence: Synthetic peptide
  MOD_RES (4)..(4): phosphorylated serine
  MOD_RES (8)..(8): oxidized methionine
REKSPGRMLFFRKNWLRLTW

SEQ ID NO: 6907 - protein, 20 aa, Artificial Sequence
  Description of Artificial Sequence: Synthetic peptide
  MOD_RES (4)..(4): phosphorylated serine
REKSPGRMLFFRKNWLRLTW

SEQ ID NO: 6908 - protein, 20 aa, Artificial Sequence
  Description of Artificial Sequence: Synthetic peptide
  MOD_RES (4)..(4): phosphorylated serine
REKSPLFQFFFRKNWLRLTW

SEQ ID NO: 6909 - protein, 20 aa, Artificial Sequence
  Description of Artificial Sequence: Synthetic peptide
  MOD_RES (4)..(4): phosphorylated serine
REKSPLFQWFFRKNWLRLTW

SEQ ID NO: 6910 - protein, 20 aa, Artificial Sequence
  Description of Artificial Sequence: Synthetic peptide
  MOD_RES (4)..(4): phosphorylated serine
REKSPLFQYFFRKNWLRLTW

SEQ ID NO: 6911 - protein, 20 aa, Artificial Sequence
  Description of Artificial Sequence: Synthetic peptide
  MOD_RES (8)..(8): phosphorylated serine
RELARKGSLFFRKNWLRLTW

SEQ ID NO: 6912 - protein, 20 aa, Artificial Sequence
  Description of Artificial Sequence: Synthetic peptide
  MOD_RES (4)..(4): phosphorylated serine
RELSPLISLFFRKNWLRLTW

SEQ ID NO: 6913 - protein, 20 aa, Artificial Sequence
  Description of Artificial Sequence: Synthetic peptide
  MOD_RES (4)..(4): phosphorylated serine
REPSPLPELFFRKNWLRLTW

SEQ ID NO: 6914 - protein, 20 aa, Artificial Sequence
  Description of Artificial Sequence: Synthetic peptide
  MOD_RES (4)..(4): phosphorylated serine
RERSPSPSFFFRKNWLRLTW

SEQ ID NO: 6915 - protein, 20 aa, Artificial Sequence
  Description of Artificial Sequence: Synthetic peptide
  MOD_RES (4)..(4): phosphorylated serine
RESSPTRRLFFRKNWLRLTW

SEQ ID NO: 6916 - protein, 20 aa, Artificial Sequence
  Description of Artificial Sequence: Synthetic peptide
  MOD_RES (4)..(4): phosphorylated serine
REVSPAPAVFFRKNWLRLTW

SEQ ID NO: 6917 - protein, 20 aa, Artificial Sequence
  Description of Artificial Sequence: Synthetic peptide
  MOD_RES (5)..(5): phosphorylated serine
REYGSTSSIFFRKNWLRLTW

SEQ ID NO: 6918 - protein, 20 aa, Artificial Sequence
  Description of Artificial Sequence: Synthetic peptide
  MOD_RES (4)..(4): phosphorylated threonine
RFKTQPVTFFFRKNWLRLTW

SEQ ID NO: 6919 - protein, 19 aa, Artificial Sequence
  Description of Artificial Sequence: Synthetic peptide
  MOD_RES (7)..(7): phosphorylated threonine
RGDGYGTFFFRKNWLRLTW

SEQ ID NO: 6920 - protein, 20 aa, Artificial Sequence
  Description of Artificial Sequence: Synthetic peptide
  MOD_RES (4)..(4): phosphorylated serine
RGDSPKIDLFFRKNWLRLTW

SEQ ID NO: 6921 - protein, 22 aa, Artificial Sequence
  Description of Artificial Sequence: Synthetic peptide
  MOD_RES (4)..(4): phosphorylated serine
RIDSKDSASELFFRKNWLRLTW

SEQ ID NO: 6922 - protein, 20 aa, Artificial Sequence
  Description of Artificial Sequence: Synthetic peptide
  MOD_RES (4)..(4): phosphorylated serine
RIGSPLSPKFFRKNWLRLTW

SEQ ID NO: 6923 - protein, 20 aa, Artificial Sequence
  Description of Artificial Sequence: Synthetic peptide
  MOD_RES (4)..(4): phosphorylated serine
RILSGVVTKFFRKNWLRLTW

SEQ ID NO: 6924 - protein, 20 aa, Artificial Sequence
  Description of Artificial Sequence: Synthetic peptide
  MOD_RES (4)..(4): phosphorylated serine
RILSGVVTYFFRKNWLRLTW

SEQ ID NO: 6925 - protein, 21 aa, Artificial Sequence
  Description of Artificial Sequence: Synthetic peptide
  MOD_RES (4)..(4): phosphorylated serine
RILSPSMASKFFRKNWLRLTW

SEQ ID NO: 6926 - protein, 21 aa, Artificial Sequence
  Description of Artificial Sequence: Synthetic peptide
  MOD_RES (4)..(4): phosphorylated serine
RILSPSMASYFFRKNWLRLTW

SEQ ID NO: 6927 - protein, 20 aa, Artificial Sequence
  Description of Artificial Sequence: Synthetic peptide
  MOD_RES (4)..(4): phosphorylated serine
RINSFEEHVFFRKNWLRLTW

SEQ ID NO: 6928 - protein, 20 aa, Artificial Sequence
  Description of Artificial Sequence: Synthetic peptide
  MOD_RES (4)..(4): phosphorylated serine
RIQSKLYRAFFRKNWLRLTW

SEQ ID NO: 6929 - protein, 20 aa, Artificial Sequence
  Description of Artificial Sequence: Synthetic peptide
  MOD_RES (4)..(4): phosphorylated tyrosine
RIQYIQSRFFFRKNWLRLTW

SEQ ID NO: 6930 - protein, 21 aa, Artificial Sequence
  Description of Artificial Sequence: Synthetic peptide
  MOD_RES (4)..(4): phosphorylated tyrosine
RIQYIQSRFYFFRKNWLRLTW

SEQ ID NO: 6931 - protein, 19 aa, Artificial Sequence
  Description of Artificial Sequence: Synthetic peptide
  MOD_RES (3)..(3): phosphorylated serine
RISHELDSFFRKNWLRLTW

SEQ ID NO: 6932 - protein, 20 aa, Artificial Sequence
  Description of Artificial Sequence: Synthetic peptide
  MOD_RES (4)..(4): phosphorylated serine
RITSLIVHVFFRKNWLRLTW

SEQ ID NO: 6933 - protein, 20 aa, Artificial Sequence
  Description of Artificial Sequence: Synthetic peptide
  MOD_RES (5)..(5): phosphorylated tyrosine
RIVQYIQSRFFRKNWLRLTW

SEQ ID NO: 6934 - protein, 18 aa, Artificial Sequence
  Description of Artificial Sequence: Synthetic peptide
  MOD_RES (5)..(5): phosphorylated tyrosine
RIYQYIQFFRKNWLRLTW

SEQ ID NO: 6935 - protein, 20 aa, Artificial Sequence
  Description of Artificial Sequence: Synthetic peptide
  MOD_RES (5)..(5): phosphorylated tyrosine
RIYQYIQSKFFRKNWLRLTW

SEQ ID NO: 6936 - protein, 20 aa, Artificial Sequence
  Description of Artificial Sequence: Synthetic peptide
  MOD_RES (5)..(5): phosphorylated tyrosine
RIYQYIQSRFFRKNWLRLTW

SEQ ID NO: 6937 - protein, 21 aa, Artificial Sequence
  Description of Artificial Sequence: Synthetic peptide
  MOD_RES (5)..(5): phosphorylated tyrosine
RIYQYIQSRFFFRKNWLRLTW

SEQ ID NO: 6938 - protein, 22 aa, Artificial Sequence
  Description of Artificial Sequence: Synthetic peptide
  MOD_RES (5)..(5): phosphorylated tyrosine
RIYQYIQSRFKFFRKNWLRLTW

SEQ ID NO: 6939 - protein, 22 aa, Artificial Sequence
  Description of Artificial Sequence: Synthetic peptide
  MOD_RES (5)..(5): phosphorylated tyrosine
RIYQYIQSRFYFFRKNWLRLTW

SEQ ID NO: 6940 - protein, 21 aa, Artificial Sequence
  Description of Artificial Sequence: Synthetic peptide
  MOD_RES (5)..(5): phosphorylated tyrosine
RIYQYIQSRKFFRKNWLRLTW

SEQ ID NO: 6941 - protein, 21 aa, Artificial Sequence
  Description of Artificial Sequence: Synthetic peptide
  MOD_RES (5)..(5): phosphorylated tyrosine
RIYQYIQSRYFFRKNWLRLTW

SEQ ID NO: 6942 - protein, 20 aa, Artificial Sequence
  Description of Artificial Sequence: Synthetic peptide
  MOD_RES (5)..(5): phosphorylated tyrosine
RIYQYIQSYFFRKNWLRLTW

SEQ ID NO: 6943 - protein, 21 aa, Artificial Sequence
  Description of Artificial Sequence: Synthetic peptide
  MOD_RES (5)..(5): phosphorylated tyrosine
RIYQYLQSRFFFRKNWLRLTW

SEQ ID NO: 6944 - protein, 22 aa, Artificial Sequence
  Description of Artificial Sequence: Synthetic peptide
  MOD_RES (5)..(5): phosphorylated tyrosine
RIYQYLQSRFYFFRKNWLRLTW

SEQ ID NO: 6945 - protein, 20 aa, Artificial Sequence
  Description of Artificial Sequence: Synthetic peptide
  MOD_RES (5)..(5): phosphorylated serine
RKLRSLEQLFFRKNWLRLTW

SEQ ID NO: 6946 - protein, 20 aa, Artificial Sequence
  Description of Artificial Sequence: Synthetic peptide
  MOD_RES (4)..(4): phosphorylated serine
RKLSVILIKFFRKNWLRLTW

SEQ ID NO: 6947 - protein, 20 aa, Artificial Sequence
  Description of Artificial Sequence: Synthetic peptide
  MOD_RES (4)..(4): phosphorylated serine
RKLSVILILFFRKNWLRLTW

SEQ ID NO: 6948 - protein, 20 aa, Artificial Sequence
  Description of Artificial Sequence: Synthetic peptide
  MOD_RES (4)..(4): phosphorylated serine
RKLSVILIYFFRKNWLRLTW

SEQ ID NO: 6949 - protein, 20 aa, Artificial Sequence
  Description of Artificial Sequence: Synthetic peptide
  MOD_RES (4)..(4): phosphorylated serine
RKPSIVTKYFFRKNWLRLTW

SEQ ID NO: 6950 - protein, 20 aa, Artificial Sequence
  Description of Artificial Sequence: Synthetic peptide
  MOD_RES (4)..(4): phosphorylated serine
RKSSIIIRMFFRKNWLRLTW

SEQ ID NO: 6951 - protein, 20 aa, Artificial Sequence
  Description of Artificial Sequence: Synthetic peptide
  MOD_RES (4)..(4): phosphorylated serine
RLASASRALFFRKNWLRLTW

SEQ ID NO: 6952 - protein, 20 aa, Artificial Sequence
  Description of Artificial Sequence: Synthetic peptide
  MOD_RES (4)..(4): phosphorylated serine
RLASFAVRKFFRKNWLRLTW

SEQ ID NO: 6953 - protein, 20 aa, Artificial Sequence
  Description of Artificial Sequence: Synthetic peptide
  MOD_RES (4)..(4): phosphorylated serine
RLASFAVRYFFRKNWLRLTW

SEQ ID NO: 6954 - protein, 21 aa, Artificial Sequence
  Description of Artificial Sequence: Synthetic peptide
  MOD_RES (4)..(4): phosphorylated serine
RLASIELPSMFFRKNWLRLTW

SEQ ID NO: 6955 - protein, 23 aa, Artificial Sequence
  Description of Artificial Sequence: Synthetic peptide
  MOD_RES (4)..(4): phosphorylated serine
RLASIELPSMAVFFRKNWLRLTW

SEQ ID NO: 6956 - protein, 21 aa, Artificial Sequence
  Description of Artificial Sequence: Synthetic peptide
  MOD_RES (4)..(4): phosphorylated serine
RLASIELPSVFFRKNWLRLTW

SEQ ID NO: 6957 - protein, 21 aa, Artificial Sequence
  Description of Artificial Sequence: Synthetic peptide
  MOD_RES (4)..(4): phosphorylated serine
RLASLNAEALFFRKNWLRLTW

SEQ ID NO: 6958 - protein, 21 aa, Artificial Sequence
  Description of Artificial Sequence: Synthetic peptide
  MOD_RES (4)..(4): phosphorylated serine
RLASLNAEAVFFRKNWLRLTW

SEQ ID NO: 6959 - protein, 20 aa, Artificial Sequence
  Description of Artificial Sequence: Synthetic peptide
  MOD_RES (4)..(4): phosphorylated serine
RLASLQSEVFFRKNWLRLTW

SEQ ID NO: 6960 - protein, 20 aa, Artificial Sequence
  Description of Artificial Sequence: Synthetic peptide
  MOD_RES (4)..(4): phosphorylated serine
RLASLSISVFFRKNWLRLTW

SEQ ID NO: 6961 - protein, 20 aa, Artificial Sequence
  Description of Artificial Sequence: Synthetic peptide
  MOD_RES (4)..(4): phosphorylated serine
RLASPLVHKFFRKNWLRLTW

SEQ ID NO: 6962 - protein, 20 aa, Artificial Sequence
  Description of Artificial Sequence: Synthetic peptide
  MOD_RES (4)..(4): phosphorylated serine
RLASPLVHYFFRKNWLRLTW

SEQ ID NO: 6963 - protein, 21 aa, Artificial Sequence
  Description of Artificial Sequence: Synthetic peptide
  MOD_RES (4)..(4): phosphorylated serine
RLASPPPPPKFFRKNWLRLTW

SEQ ID NO: 6964 - protein, 21 aa, Artificial Sequence
  Description of Artificial Sequence: Synthetic peptide
  MOD_RES (4)..(4): phosphorylated serine
RLASPPPPPYFFRKNWLRLTW

SEQ ID NO: 6965 - protein, 20 aa, Artificial Sequence
  Description of Artificial Sequence: Synthetic peptide
  MOD_RES (4)..(4): phosphorylated serine
RLASPTSGVFFRKNWLRLTW

SEQ ID NO: 6966 - protein, 21 aa, Artificial Sequence
  Description of Artificial Sequence: Synthetic peptide
  MOD_RES (4)..(4): phosphorylated serine
RLASPTSGVKFFRKNWLRLTW

SEQ ID NO: 6967 - protein, 22 aa, Artificial Sequence
  Description of Artificial Sequence: Synthetic peptide
  MOD_RES (4)..(4): phosphorylated serine
RLASPTSGVKKFFRKNWLRLTW

SEQ ID NO: 6968 - protein, 22 aa, Artificial Sequence
  Description of Artificial Sequence: Synthetic peptide
  MOD_RES (4)..(4): phosphorylated serine
RLASPTSGVKRFFRKNWLRLTW

SEQ ID NO: 6969 - protein, 22 aa, Artificial Sequence
  Description of Artificial Sequence: Synthetic peptide
  MOD_RES (4)..(4): phosphorylated serine
RLASPTSGVKYFFRKNWLRLTW

SEQ ID NO: 6970 - protein, 20 aa, Artificial Sequence
  Description of Artificial Sequence: Synthetic peptide
  MOD_RES (4)..(4): phosphorylated serine
RLASRPLLLFFRKNWLRLTW

SEQ ID NO: 6971 - protein, 22 aa, Artificial Sequence
  Description of Artificial Sequence: Synthetic peptide
  MOD_RES (4)..(4): phosphorylated serine
RLASSATQVHKFFRKNWLRLTW

SEQ ID NO: 6972 - protein, 20 aa, Artificial Sequence
  Description of Artificial Sequence: Synthetic peptide
  MOD_RES (4)..(4): phosphorylated serine
RLASYLDKVFFRKNWLRLTW

SEQ ID NO: 6973 - protein, 20 aa, Artificial Sequence
  Description of Artificial Sequence: Synthetic peptide
  MOD_RES (4)..(4): phosphorylated serine
RLASYLDRVFFRKNWLRLTW

SEQ ID NO: 6974 - protein, 22 aa, Artificial Sequence
  Description of Artificial Sequence: Synthetic peptide
  MOD_RES (4)..(4): phosphorylated serine
RLDSTPGKVFLFFRKNWLRLTW

SEQ ID NO: 6975 - protein, 22 aa, Artificial Sequence
  Description of Artificial Sequence: Synthetic peptide
  MOD_RES (4)..(4): phosphorylated serine
RLDSTPGKVFVFFRKNWLRLTW

SEQ ID NO: 6976 - protein, 20 aa, Artificial Sequence
  Description of Artificial Sequence: Synthetic peptide
  MOD_RES (4)..(4): phosphorylated serine
RLDSYLRAPFFRKNWLRLTW

SEQ ID NO: 6977 - protein, 18 aa, Artificial Sequence
  Description of Artificial Sequence: Synthetic peptide
  MOD_RES (4)..(4): phosphorylated serine
RLDSYVRFFRKNWLRLTW

SEQ ID NO: 6978 - protein, 19 aa, Artificial Sequence
  Description of Artificial Sequence: Synthetic peptide
  MOD_RES (4)..(4): phosphorylated serine
RLDSYVRSFFRKNWLRLTW

SEQ ID NO: 6979 - protein, 20 aa, Artificial Sequence
  Description of Artificial Sequence: Synthetic peptide
  MOD_RES (4)..(4): phosphorylated serine
RLDSYVRSLFFRKNWLRLTW

SEQ ID NO: 6980 - protein, 20 aa, Artificial Sequence
  Description of Artificial Sequence: Synthetic peptide
  MOD_RES (4)..(4): phosphorylated serine
RLDSYVRSVFFRKNWLRLTW

SEQ ID NO: 6981 - protein, 20 aa, Artificial Sequence
  Description of Artificial Sequence: Synthetic peptide
  MOD_RES (4)..(4): phosphorylated threonine
RLDTGPQSLFFRKNWLRLTW

SEQ ID NO: 6982 - protein, 20 aa, Artificial Sequence
  Description of Artificial Sequence: Synthetic peptide
  MOD_RES (4)..(4): phosphorylated serine
RLESANRRLFFRKNWLRLTW

SEQ ID NO: 6983 - protein, 21 aa, Artificial Sequence
  Description of Artificial Sequence: Synthetic peptide
  MOD_RES (4)..(4): phosphorylated serine
RLFSFSKTPKFFRKNWLRLTW

SEQ ID NO: 6984 - protein, 18 aa, Artificial Sequence
  Description of Artificial Sequence: Synthetic peptide
  MOD_RES (4)..(4): phosphorylated serine
RLFSKELFFRKNWLRLTW

SEQ ID NO: 6985 - protein, 19 aa, Artificial Sequence
  Description of Artificial Sequence: Synthetic peptide
  MOD_RES (4)..(4): phosphorylated serine
RLFSKELRFFRKNWLRLTW

SEQ ID NO: 6986 - protein, 20 aa, Artificial Sequence
  Description of Artificial Sequence: Synthetic peptide
  MOD_RES (4)..(4): phosphorylated serine
RLFSKELRCFFRKNWLRLTW

SEQ ID NO: 6987 - protein, 20 aa, Artificial Sequence
  Description of Artificial Sequence: Synthetic peptide
  MOD_RES (4)..(4): phosphorylated serine
RLFSKELRVFFRKNWLRLTW

SEQ ID NO: 6988 - protein, 21 aa, Artificial Sequence
  Description of Artificial Sequence: Synthetic peptide
  MOD_RES (6)..(6): phosphorylated serine
RLFSLSNPSLFFRKNWLRLTW

SEQ ID NO: 6989 - protein, 20 aa, Artificial Sequence
  Description of Artificial Sequence: Synthetic peptide
  MOD_RES (4)..(4): phosphorylated serine
RLFSPTYGLFFRKNWLRLTW

SEQ ID NO: 6990 - protein, 20 aa, Artificial Sequence
  Description of Artificial Sequence: Synthetic peptide
  MOD_RES (4)..(4): phosphorylated serine
RLFSPTYGVFFRKNWLRLTW

SEQ ID NO: 6991 - protein, 20 aa, Artificial Sequence
  Description of Artificial Sequence: Synthetic peptide
  MOD_RES (4)..(4): phosphorylated serine
RLFSQGQDVFFRKNWLRLTW

SEQ ID NO: 6992 - protein, 20 aa, Artificial Sequence
  Description of Artificial Sequence: Synthetic peptide
  MOD_RES (6)..(6): phosphorylated serine
RLFVGSIPKFFRKNWLRLTW

SEQ ID NO: 6993 - protein, 21 aa, Artificial Sequence
  Description of Artificial Sequence: Synthetic peptide
  MOD_RES (4)..(4): phosphorylated serine
RLGSFHELLLFFRKNWLRLTW

SEQ ID NO: 6994 - protein, 20 aa, Artificial Sequence
  Description of Artificial Sequence: Synthetic peptide
  MOD_RES (4)..(4): phosphorylated serine
RLISFKAEVFFRKNWLRLTW

SEQ ID NO: 6995 - protein, 20 aa, Artificial Sequence
  Description of Artificial Sequence: Synthetic peptide
  MOD_RES (4)..(4): phosphorylated serine
RLISPYKKKFFRKNWLRLTW

SEQ ID NO: 6996 - protein, 20 aa, Artificial Sequence
  Description of Artificial Sequence: Synthetic peptide
  MOD_RES (4)..(4): phosphorylated serine
RLISQDVKLFFRKNWLRLTW

SEQ ID NO: 6997 - protein, 20 aa, Artificial Sequence
  Description of Artificial Sequence: Synthetic peptide
  MOD_RES (4)..(4): phosphorylated serine
RLISQDVKVFFRKNWLRLTW

SEQ ID NO: 6998 - protein, 20 aa, Artificial Sequence
  Description of Artificial Sequence: Synthetic peptide
  MOD_RES (6)..(6): phosphorylated serine
RLKLPSGSKFFRKNWLRLTW

SEQ ID NO: 6999 - protein, 21 aa, Artificial Sequence
  Description of Artificial Sequence: Synthetic peptide
  MOD_RES (6)..(6): phosphorylated serine
RLKLPSGSKKFFRKNWLRLTW

SEQ ID NO: 7000 - protein, 21 aa, Artificial Sequence
  Description of Artificial Sequence: Synthetic peptide
  MOD_RES (6)..(6): phosphorylated serine
RLKLPSGSKYFFRKNWLRLTW

SEQ ID NO: 7001 - protein, 22 aa, Artificial Sequence
  Description of Artificial Sequence: Synthetic peptide
  MOD_RES (4)..(4): phosphorylated serine
RLKSDERPVHIFFRKNWLRLTW

SEQ ID NO: 7002 - protein, 20 aa, Artificial Sequence
  Description of Artificial Sequence: Synthetic peptide
  MOD_RES (4)..(4): phosphorylated serine
RLKSPFRKKFFRKNWLRLTW

SEQ ID NO: 7003 - protein, 22 aa, Artificial Sequence
  Description of Artificial Sequence: Synthetic peptide
  MOD_RES (4)..(4): phosphorylated serine
  MOD_RES (7)..(7): phosphorylated serine
RLKSPGSGHVKFFRKNWLRLTW

SEQ ID NO: 7004 - protein, 20 aa, Artificial Sequence
  Description of Artificial Sequence: Synthetic peptide
  MOD_RES (4)..(4): phosphorylated serine
RLKSPISLKFFRKNWLRLTW

SEQ ID NO: 7005 - protein, 20 aa, Artificial Sequence
  Description of Artificial Sequence: Synthetic peptide
  MOD_RES (4)..(4): phosphorylated serine
RLKSPISLYFFRKNWLRLTW

SEQ ID NO: 7006 - protein, 22 aa, Artificial Sequence
  Description of Artificial Sequence: Synthetic peptide
  MOD_RES (4)..(4): phosphorylated serine
RLKSPSPKSEKFFRKNWLRLTW

SEQ ID NO: 7007 - protein, 22 aa, Artificial Sequence
  Description of Artificial Sequence: Synthetic peptide
  MOD_RES (4)..(4): phosphorylated serine
RLKSPSPKSERFFRKNWLRLTW

SEQ ID NO: 7008 - protein, 22 aa, Artificial Sequence
  Description of Artificial Sequence: Synthetic peptide
  MOD_RES (4)..(4): phosphorylated threonine
RLKTPTSQSYKFFRKNWLRLTW

SEQ ID NO: 7009 - protein, 22 aa, Artificial Sequence
  Description of Artificial Sequence: Synthetic peptide
  MOD_RES (4)..(4): phosphorylated threonine
RLKTPTSQSYRFFRKNWLRLTW

SEQ ID NO: 7010 - protein, 20 aa, Artificial Sequence
  Description of Artificial Sequence: Synthetic peptide
  MOD_RES (5)..(5): phosphorylated threonine
RLKTTPLRKFFRKNWLRLTW

SEQ ID NO: 7011 - protein, 20 aa, Artificial Sequence
  Description of Artificial Sequence: Synthetic peptide
  MOD_RES (5)..(5): phosphorylated threonine
RLKTTPLRRFFRKNWLRLTW

SEQ ID NO: 7012 - protein, 22 aa, Artificial Sequence
  Description of Artificial Sequence: Synthetic peptide
  MOD_RES (6)..(6): phosphorylated serine
RLLDPSSPLALFFRKNWLRLTW

SEQ ID NO: 7013 - protein, 22 aa, Artificial Sequence
  Description of Artificial Sequence: Synthetic peptide
  MOD_RES (7)..(7): phosphorylated serine
RLLDPSSPLALFFRKNWLRLTW

SEQ ID NO: 7014 - protein, 23 aa, Artificial Sequence
  Description of Artificial Sequence: Synthetic peptide
  MOD_RES (8)..(8): phosphorylated serine
RLLDRSPSRSAKFFRKNWLRLTW

SEQ ID NO: 7015 - protein, 23 aa, Artificial Sequence
  Description of Artificial Sequence: Synthetic peptide
  MOD_RES (8)..(8): phosphorylated serine
RLLDRSPSRSAYFFRKNWLRLTW

SEQ ID NO: 7016 - protein, 21 aa, Artificial Sequence
  Description of Artificial Sequence: Synthetic peptide
  MOD_RES (4)..(4): phosphorylated serine
RLLSDGQQHLFFRKNWLRLTW

SEQ ID NO: 7017 - protein, 20 aa, Artificial Sequence
  Description of Artificial Sequence: Synthetic peptide
  MOD_RES (4)..(4): phosphorylated serine
RLLSDLEELFFRKNWLRLTW

SEQ ID NO: 7018 - protein, 20 aa, Artificial Sequence
  Description of Artificial Sequence: Synthetic peptide
  MOD_RES (4)..(4): phosphorylated serine
RLLSDQTRLFFRKNWLRLTW

SEQ ID NO: 7019 - protein, 20 aa, Artificial Sequence
  Description of Artificial Sequence: Synthetic peptide
  MOD_RES (4)..(4): phosphorylated serine
RLLSFQRYLFFRKNWLRLTW

SEQ ID NO: 7020 - protein, 20 aa, Artificial Sequence
  Description of Artificial Sequence: Synthetic peptide
  MOD_RES (4)..(4): phosphorylated serine
RLLSGVVTKFFRKNWLRLTW

SEQ ID NO: 7021 - protein, 20 aa, Artificial Sequence
  Description of Artificial Sequence: Synthetic peptide
  MOD_RES (4)..(4): phosphorylated serine
RLLSGVVTYFFRKNWLRLTW

SEQ ID NO: 7022 - protein, 20 aa, Artificial Sequence
  Description of Artificial Sequence: Synthetic peptide
  MOD_RES (4)..(4): phosphorylated serine
RLLSHISEAFFRKNWLRLTW

SEQ ID NO: 7023 - protein, 20 aa, Artificial Sequence
  Description of Artificial Sequence: Synthetic peptide
  MOD_RES (4)..(4): phosphorylated serine
RLLSHISEVFFRKNWLRLTW

SEQ ID NO: 7024 - protein, 20 aa, Artificial Sequence
  Description of Artificial Sequence: Synthetic peptide
  MOD_RES (4)..(4): phosphorylated serine
RLLSPLSSAFFRKNWLRLTW

SEQ ID NO: 7025 - protein, 22 aa, Artificial Sequence
  Description of Artificial Sequence: Synthetic peptide
  MOD_RES (4)..(4): phosphorylated serine
RLLSPLSSARLFFRKNWLRLTW

SEQ ID NO: 7026 - protein, 20 aa, Artificial Sequence
  Description of Artificial Sequence: Synthetic peptide
  MOD_RES (4)..(4): phosphorylated serine
RLLSPLSSVFFRKNWLRLTW

SEQ ID NO: 7027 - protein, 21 aa, Artificial Sequence
  Description of Artificial Sequence: Synthetic peptide
  MOD_RES (4)..(4): phosphorylated serine
RLLSPQQPALFFRKNWLRLTW

SEQ ID NO: 7028 - protein, 20 aa, Artificial Sequence
  Description of Artificial Sequence: Synthetic peptide
  MOD_RES (4)..(4): phosphorylated serine
RLLSPRPSLFFRKNWLRLTW

SEQ ID NO: 7029 - protein, 21 aa, Artificial Sequence
  Description of Artificial Sequence: Synthetic peptide
  MOD_RES (4)..(4): phosphorylated serine
RLLSPRPSLLFFRKNWLRLTW

SEQ ID NO: 7030 - protein, 21 aa, Artificial Sequence
  Description of Artificial Sequence: Synthetic peptide
  MOD_RES (4)..(4): phosphorylated serine
RLLSPSMASKFFRKNWLRLTW

SEQ ID NO: 7031 - protein, 21 aa, Artificial Sequence
  Description of Artificial Sequence: Synthetic peptide
  MOD_RES (4)..(4): phosphorylated serine
RLLSSGVSEIFFRKNWLRLTW

SEQ ID NO: 7032 - protein, 21 aa, Artificial Sequence
  Description of Artificial Sequence: Synthetic peptide
  MOD_RES (4)..(4): phosphorylated serine
RLLSSGVSEVFFRKNWLRLTW

SEQ ID NO: 7033 - protein, 21 aa, Artificial Sequence
  Description of Artificial Sequence: Synthetic peptide
  MOD_RES (4)..(4): phosphorylated serine
RLLSTDAEAVFFRKNWLRLTW

SEQ ID NO: 7034 - protein, 20 aa, Artificial Sequence
  Description of Artificial Sequence: Synthetic peptide
  MOD_RES (4)..(4): phosphorylated serine
RLLSVEIVKFFRKNWLRLTW

SEQ ID NO: 7035 - protein, 20 aa, Artificial Sequence
  Description of Artificial Sequence: Synthetic peptide
  MOD_RES (4)..(4): phosphorylated serine
RLLSVEIVYFFRKNWLRLTW

SEQ ID NO: 7036 - protein, 21 aa, Artificial Sequence
  Description of Artificial Sequence: Synthetic peptide
  MOD_RES (4)..(4): phosphorylated serine
RLLSVHDFDFFFRKNWLRLTW

SEQ ID NO: 7037 - protein, 20 aa, Artificial Sequence
  Description of Artificial Sequence: Synthetic peptide
  MOD_RES (4)..(4): phosphorylated serine
RLLSVILIKFFRKNWLRLTW

SEQ ID NO: 7038 - protein, 20 aa, Artificial Sequence
  Description of Artificial Sequence: Synthetic peptide
  MOD_RES (4)..(4): phosphorylated serine
RLMSMPVAKFFRKNWLRLTW

SEQ ID NO: 7039 - protein, 20 aa, Artificial Sequence
  Description of Artificial Sequence: Synthetic peptide
  MOD_RES (4)..(4): phosphorylated serine
RLMSMPVAYFFRKNWLRLTW

SEQ ID NO: 7040 - protein, 21 aa, Artificial Sequence
  Description of Artificial Sequence: Synthetic peptide
  MOD_RES (4)..(4): phosphorylated threonine
RLNTSDFQKLFFRKNWLRLTW

SEQ ID NO: 7041 - protein, 20 aa, Artificial Sequence
  Description of Artificial Sequence: Synthetic peptide
  MOD_RES (8)..(8): phosphorylated serine
RLPNRIPSLFFRKNWLRLTW

SEQ ID NO: 7042 - protein, 21 aa, Artificial Sequence
  Description of Artificial Sequence: Synthetic peptide
  MOD_RES (4)..(4): phosphorylated serine
RLPSFLKKNKFFRKNWLRLTW

SEQ ID NO: 7043 - protein, 20 aa, Artificial Sequence
  Description of Artificial Sequence: Synthetic peptide
  MOD_RES (4)..(4): phosphorylated serine
RLPSLVHGYFFRKNWLRLTW

SEQ ID NO: 7044 - protein, 20 aa, Artificial Sequence
  Description of Artificial Sequence: Synthetic peptide
  MOD_RES (4)..(4): phosphorylated serine
RLPSSTLKKFFRKNWLRLTW

SEQ ID NO: 7045 - protein, 20 aa, Artificial Sequence
  Description of Artificial Sequence: Synthetic peptide
  MOD_RES (4)..(4): phosphorylated serine
RLPSSTLKRFFRKNWLRLTW

SEQ ID NO: 7046 - protein, 20 aa, Artificial Sequence
  Description of Artificial Sequence: Synthetic peptide
  MOD_RES (4)..(4): phosphorylated serine
RLPSSTLKYFFRKNWLRLTW

SEQ ID NO: 7047 - protein, 20 aa, Artificial Sequence
  Description of Artificial Sequence: Synthetic peptide
  MOD_RES (4)..(4): phosphorylated serine
RLQSLIKNIFFRKNWLRLTW

SEQ ID NO: 7048 - protein, 20 aa, Artificial Sequence
  Description of Artificial Sequence: Synthetic peptide
  MOD_RES (4)..(4): phosphorylated serine
RLQSTSERLFFRKNWLRLTW

SEQ ID NO: 7049 - protein, 20 aa, Artificial Sequence
  Description of Artificial Sequence: Synthetic peptide
  MOD_RES (4)..(4): phosphorylated serine
RLQSTSERVFFRKNWLRLTW

SEQ ID NO: 7050 - protein, 23 aa, Artificial Sequence
  Description of Artificial Sequence: Synthetic peptide
  MISC_FEATURE (4)..(7): at least one serine residue in the amino acid sequence SLSS is phosphorylated
RLRSLSSPTVTLFFRKNWLRLTW

SEQ ID NO: 7051 - protein, 23 aa, Artificial Sequence
  Description of Artificial Sequence: Synthetic peptide
  MISC_FEATURE (4)..(7): at least one serine residue in the amino acid sequence SLSS is phosphorylated
RLRSLSSPTVTVFFRKNWLRLTW

SEQ ID NO: 7052 - protein, 21 aa, Artificial Sequence
  Description of Artificial Sequence: Synthetic peptide
  MOD_RES (5)..(5): phosphorylated serine
RLRQSPLATKFFRKNWLRLTW

SEQ ID NO: 7053 - protein, 21 aa, Artificial Sequence
  Description of Artificial Sequence: Synthetic peptide
  MOD_RES (5)..(5): phosphorylated serine
RLRQSPLATRFFRKNWLRLTW

SEQ ID NO: 7054 - protein, 21 aa, Artificial Sequence
  Description of Artificial Sequence: Synthetic peptide
  MOD_RES (5)..(5): phosphorylated serine
RLRQSPLATYFFRKNWLRLTW

SEQ ID NO: 7055 - protein, 20 aa, Artificial Sequence
  Description of Artificial Sequence: Synthetic peptide
  MOD_RES (5)..(5): phosphorylated serine
RLRRSPLLKFFRKNWLRLTW

SEQ ID NO: 7056 - protein, 21 aa, Artificial Sequence
  Description of Artificial Sequence: Synthetic peptide
  MOD_RES (4)..(4): phosphorylated serine
RLRSAGAAQKFFRKNWLRLTW

SEQ ID NO: 7057 - protein, 22 aa, Artificial Sequence
  Description of Artificial Sequence: Synthetic peptide
  MOD_RES (4)..(4): phosphorylated serine
RLRSLSSLREKFFRKNWLRLTW

SEQ ID NO: 7058 - protein, 21 aa, Artificial Sequence
  Description of Artificial Sequence: Synthetic peptide
  MOD_RES (4)..(4): phosphorylated serine
RLRSPPPVSKFFRKNWLRLTW

SEQ ID NO: 7059 - protein, 20 aa, Artificial Sequence
  Description of Artificial Sequence: Synthetic peptide
  MOD_RES (4)..(4): phosphorylated serine
RLRSYEDMIFFRKNWLRLTW

SEQ ID NO: 7060 - protein, 21 aa, Artificial Sequence
  Description of Artificial Sequence: Synthetic peptide
  MOD_RES (5)..(5): phosphorylated serine
RLRTSPITRKFFRKNWLRLTW

SEQ ID NO: 7061 - protein, 21 aa, Artificial Sequence
  Description of Artificial Sequence: Synthetic peptide
  MOD_RES (5)..(5): phosphorylated serine
RLRTSPITRRFFRKNWLRLTW

SEQ ID NO: 7062 - protein, 20 aa, Artificial Sequence
  Description of Artificial Sequence: Synthetic peptide
  MOD_RES (5)..(5): phosphorylated threonine
RLSDTPPLLFFRKNWLRLTW

SEQ ID NO: 7063 - protein, 20 aa, Artificial Sequence
  Description of Artificial Sequence: Synthetic peptide
  MOD_RES (4)..(4): phosphorylated serine
RLSSLIRHKFFRKNWLRLTW

SEQ ID NO: 7064 - protein, 22 aa, Artificial Sequence
  Description of Artificial Sequence: Synthetic peptide
  MOD_RES (4)..(4): phosphorylated serine
RLSSLRASTSKFFRKNWLRLTW

SEQ ID NO: 7065 - protein, 20 aa, Artificial Sequence
  Description of Artificial Sequence: Synthetic peptide
  MOD_RES (4)..(4): phosphorylated serine
RLSSPISKKFFRKNWLRLTW

SEQ ID NO: 7066 - protein, 20 aa, Artificial Sequence
  Description of Artificial Sequence: Synthetic peptide
  MOD_RES (4)..(4): phosphorylated serine
RLSSPISKRFFRKNWLRLTW

SEQ ID NO: 7067 - protein, 20 aa, Artificial Sequence
  Description of Artificial Sequence: Synthetic peptide
  MOD_RES (4)..(4): phosphorylated serine
RLSSPISKYFFRKNWLRLTW

SEQ ID NO: 7068 - protein, 20 aa, Artificial Sequence
  Description of Artificial Sequence: Synthetic peptide
  MOD_RES (3)..(3): phosphorylated serine
RLSSPLHFVFFRKNWLRLTW

SEQ ID NO: 7069 - protein, 20 aa, Artificial Sequence
  Description of Artificial Sequence: Synthetic peptide
  MOD_RES (4)..(4): phosphorylated serine
RLSSPLHFVFFRKNWLRLTW

SEQ ID NO: 7070 - protein, 20 aa, Artificial Sequence
  Description of Artificial Sequence: Synthetic peptide
  MOD_RES (4)..(4): phosphorylated serine
RLSSPVLHKFFRKNWLRLTW

SEQ ID NO: 7071 - protein, 20 aa, Artificial Sequence
  Description of Artificial Sequence: Synthetic peptide
  MOD_RES (4)..(4): phosphorylated serine
RLSSPVLHRFFRKNWLRLTW

SEQ ID NO: 7072 - protein, 20 aa, Artificial Sequence
  Description of Artificial Sequence: Synthetic peptide
  MOD_RES (4)..(4): phosphorylated serine
RLSSPVLHYFFRKNWLRLTW

SEQ ID NO: 7073 - protein, 20 aa, Artificial Sequence
  Description of Artificial Sequence: Synthetic peptide
  MOD_RES (4)..(4): phosphorylated serine
RLSSRFSSKFFRKNWLRLTW

SEQ ID NO: 7074 - protein, 20 aa, Artificial Sequence
  Description of Artificial Sequence: Synthetic peptide
  MOD_RES (4)..(4): phosphorylated serine
RLSSRFSSRFFRKNWLRLTW

SEQ ID NO: 7075 - protein, 20 aa, Artificial Sequence
  Description of Artificial Sequence: Synthetic peptide
  MOD_RES (4)..(4): phosphorylated serine
RLSSRFSSYFFRKNWLRLTW

SEQ ID NO: 7076 - protein, 20 aa, Artificial Sequence
  Description of Artificial Sequence: Synthetic peptide
  MOD_RES (4)..(4): phosphorylated serine
RLSSRYSQKFFRKNWLRLTW

SEQ ID NO: 7077 - protein, 20 aa, Artificial Sequence
  Description of Artificial Sequence: Synthetic peptide
  MOD_RES (4)..(4): phosphorylated serine
RLSSRYSQYFFRKNWLRLTW

SEQ ID NO: 7078 - protein, 21 aa, Artificial Sequence
  Description of Artificial Sequence: Synthetic peptide
  MOD_RES (4)..(4): phosphorylated serine
RLSSVKLISKFFRKNWLRLTW

SEQ ID NO: 7079 - protein, 21 aa, Artificial Sequence
  Description of Artificial Sequence: Synthetic peptide
  MOD_RES (4)..(4): phosphorylated serine
RLSSVKLISYFFRKNWLRLTW

SEQ ID NO: 7080 - protein, 21 aa, Artificial Sequence
  Description of Artificial Sequence: Synthetic peptide
  MOD_RES (5)..(5): phosphorylated serine
RLTFSPTYGVFFRKNWLRLTW

SEQ ID NO: 7081 - protein, 20 aa, Artificial Sequence
  Description of Artificial Sequence: Synthetic peptide
  MOD_RES (4)..(4): phosphorylated serine
RLVSLSMRKFFRKNWLRLTW

SEQ ID NO: 7082 - protein, 20 aa, Artificial Sequence
  Description of Artificial Sequence: Synthetic peptide
  MOD_RES (4)..(4): phosphorylated serine
RLVSLSMRYFFRKNWLRLTW

SEQ ID NO: 7083 - protein, 20 aa, Artificial Sequence
  Description of Artificial Sequence: Synthetic peptide
  MOD_RES (5)..(5): phosphorylated serine
RLYKSPLRHFFRKNWLRLTW

SEQ ID NO: 7084 - protein, 20 aa, Artificial Sequence
  Description of Artificial Sequence: Synthetic peptide
  MOD_RES (5)..(5): phosphorylated serine
RLYKSPLRKFFRKNWLRLTW

SEQ ID NO: 7085 - protein, 20 aa, Artificial Sequence
  Description of Artificial Sequence: Synthetic peptide
  MOD_RES (5)..(5): phosphorylated tyrosine
RLYQYIQSKFFRKNWLRLTW

SEQ ID NO: 7086 - protein, 20 aa, Artificial Sequence
  Description of Artificial Sequence: Synthetic peptide
  MOD_RES (5)..(5): phosphorylated tyrosine
RLYQYIQSRFFRKNWLRLTW

SEQ ID NO: 7087 - protein, 22 aa, Artificial Sequence
  Description of Artificial Sequence: Synthetic peptide
  MOD_RES (5)..(5): phosphorylated tyrosine
RLYQYIQSRFKFFRKNWLRLTW

SEQ ID NO: 7088 - protein, 22 aa, Artificial Sequence
  Description of Artificial Sequence: Synthetic peptide
  MOD_RES (5)..(5): phosphorylated tyrosine
RLYQYIQSRFYFFRKNWLRLTW

SEQ ID NO: 7089 - protein, 20 aa, Artificial Sequence
  Description of Artificial Sequence: Synthetic peptide
  MOD_RES (5)..(5): phosphorylated tyrosine
RLYQYIQSYFFRKNWLRLTW

SEQ ID NO: 7090 - protein, 20 aa, Artificial Sequence
  Description of Artificial Sequence: Synthetic peptide
  MOD_RES (5)..(5): phosphorylated tyrosine
RLYQYLQSKFFRKNWLRLTW

SEQ ID NO: 7091 - protein, 21 aa, Artificial Sequence
  Description of Artificial Sequence: Synthetic peptide
  MOD_RES (5)..(5): phosphorylated tyrosine
RLYQYLQSRFFFRKNWLRLTW

SEQ ID NO: 7092 - protein, 22 aa, Artificial Sequence
  Description of Artificial Sequence: Synthetic peptide
  MOD_RES (5)..(5): phosphorylated tyrosine
RLYQYLQSRFKFFRKNWLRLTW

SEQ ID NO: 7093 - protein, 22 aa, Artificial Sequence
  Description of Artificial Sequence: Synthetic peptide
  MOD_RES (5)..(5): phosphorylated tyrosine
RLYQYLQSRFYFFRKNWLRLTW

SEQ ID NO: 7094 - protein, 21 aa, Artificial Sequence
  Description of Artificial Sequence: Synthetic peptide
  MOD_RES (5)..(5): phosphorylated tyrosine
RLYQYLQSRKFFRKNWLRLTW

SEQ ID NO: 7095 - protein, 21 aa, Artificial Sequence
  Description of Artificial Sequence: Synthetic peptide
  MOD_RES (4)..(4): phosphorylated serine
RLYSGPMNKVFFRKNWLRLTW

SEQ ID NO: 7096 - protein, 20 aa, Artificial Sequence
  Description of Artificial Sequence: Synthetic peptide
  MOD_RES (4)..(4): phosphorylated serine
  MOD_RES (8)..(8): phosphorylated serine
RLYSGSRSKFFRKNWLRLTW

SEQ ID NO: 7097 - protein, 20 aa, Artificial Sequence
  Description of Artificial Sequence: Synthetic peptide
  MOD_RES (4)..(4): phosphorylated serine
  MOD_RES (8)..(8): phosphorylated serine
RLYSGSRSRFFRKNWLRLTW

SEQ ID NO: 7098 - protein, 20 aa, Artificial Sequence
  Description of Artificial Sequence: Synthetic peptide
  MOD_RES (4)..(4): phosphorylated serine
  MOD_RES (8)..(8): phosphorylated serine
RLYSGSRSYFFRKNWLRLTW

SEQ ID NO: 7099 - protein, 20 aa, Artificial Sequence
  Description of Artificial Sequence: Synthetic peptide
  MOD_RES (4)..(4): phosphorylated serine
RLYSKSRDKFFRKNWLRLTW

SEQ ID NO: 7100 - protein, 21 aa, Artificial Sequence
  Description of Artificial Sequence: Synthetic peptide
  MOD_RES (4)..(4): phosphorylated serine
RLYSPDHRQKFFRKNWLRLTW

SEQ ID NO: 7101 - protein, 20 aa, Artificial Sequence
  Description of Artificial Sequence: Synthetic peptide
  MOD_RES (4)..(4): phosphorylated serine
RLYSPERSKFFRKNWLRLTW

SEQ ID NO: 7102 - protein, 20 aa, Artificial Sequence
  Description of Artificial Sequence: Synthetic peptide
  MOD_RES (4)..(4): phosphorylated serine
RLYSPRNSKFFRKNWLRLTW

SEQ ID NO: 7103 - protein, 20 aa, Artificial Sequence
  Description of Artificial Sequence: Synthetic peptide
  MOD_RES (4)..(4): phosphorylated serine
RLYSPYNHKFFRKNWLRLTW

SEQ ID NO: 7104 - protein, 20 aa, Artificial Sequence
  Description of Artificial Sequence: Synthetic peptide
  MOD_RES (4)..(4): phosphorylated serine
RLYSPYNHRFFRKNWLRLTW

SEQ ID NO: 7105 - protein, 20 aa, Artificial Sequence
  Description of Artificial Sequence: Synthetic peptide
  MOD_RES (4)..(4): phosphorylated serine
RLYSPYNHYFFRKNWLRLTW

SEQ ID NO: 7106 - protein, 20 aa, Artificial Sequence
  Description of Artificial Sequence: Synthetic peptide
  MOD_RES (6)..(6): phosphorylated serine
RLYSRSFSKFFRKNWLRLTW

SEQ ID NO: 7107 - protein, 20 aa, Artificial Sequence
  Description of Artificial Sequence: Synthetic peptide
  MOD_RES (6)..(6): phosphorylated serine
RLYSRSFSYFFRKNWLRLTW

SEQ ID NO: 7108 - protein, 20 aa, Artificial Sequence
  Description of Artificial Sequence: Synthetic peptide
  MOD_RES (4)..(4): phosphorylated serine
RLYSYPRQKFFRKNWLRLTW

SEQ ID NO: 7109 - protein, 25 aa, Artificial Sequence
  Description of Artificial Sequence: Synthetic peptide
  MOD_RES (12)..(12): phosphorylated serine
RLYVTTSTRTYSLGFFRKNWLRLTW

SEQ ID NO: 7110 - protein, 25 aa, Artificial Sequence
  Description of Artificial Sequence: Synthetic peptide
  MOD_RES (12)..(12): phosphorylated serine
RLYVTTSTRTYSLKFFRKNWLRLTW

SEQ ID NO: 7111 - protein, 25 aa, Artificial Sequence
  Description of Artificial Sequence: Synthetic peptide
  MOD_RES (12)..(12): phosphorylated serine
RLYVTTSTRTYSLYFFRKNWLRLTW

SEQ ID NO: 7112 - protein, 21 aa, Artificial Sequence
  Description of Artificial Sequence: Synthetic peptide
  MOD_RES (4)..(4): phosphorylated serine
RMASPPPPPKFFRKNWLRLTW

SEQ ID NO: 7113 - protein, 20 aa, Artificial Sequence
  Description of Artificial Sequence: Synthetic peptide
  MOD_RES (4)..(4): phosphorylated serine
RMASPTSGVFFRKNWLRLTW

SEQ ID NO: 7114 - protein, 21 aa, Artificial Sequence
  Description of Artificial Sequence: Synthetic peptide
  MOD_RES (4)..(4): phosphorylated serine
RMASPTSGVKFFRKNWLRLTW

SEQ ID NO: 7115 - protein, 22 aa, Artificial Sequence
  Description of Artificial Sequence: Synthetic peptide
  MOD_RES (4)..(4): phosphorylated serine
RMASPTSGVKKFFRKNWLRLTW

SEQ ID NO: 7116 - protein, 22 aa, Artificial Sequence
  Description of Artificial Sequence: Synthetic peptide
  MOD_RES (4)..(4): phosphorylated serine
RMASPTSGVKRFFRKNWLRLTW

SEQ ID NO: 7117 - protein, 22 aa, Artificial Sequence
  Description of Artificial Sequence: Synthetic peptide
  MOD_RES (4)..(4): phosphorylated serine
RMASPTSGVKYFFRKNWLRLTW

SEQ ID NO: 7118 - protein, 22 aa, Artificial Sequence
  Description of Artificial Sequence: Synthetic peptide
  MOD_RES (4)..(4): phosphorylated serine
RMASSATQVHKFFRKNWLRLTW

SEQ ID NO: 7119 - protein, 22 aa, Artificial Sequence
  Description of Artificial Sequence: Synthetic peptide
  MOD_RES (4)..(4): phosphorylated serine
RMDSTPGKVFLFFRKNWLRLTW

SEQ ID NO: 7120 - protein, 22 aa, Artificial Sequence
  Description of Artificial Sequence: Synthetic peptide
  MOD_RES (4)..(4): phosphorylated serine
RMDSTPGKVFVFFRKNWLRLTW

SEQ ID NO: 7121 - protein, 20 aa, Artificial Sequence
  Description of Artificial Sequence: Synthetic peptide
  MOD_RES (4)..(4): phosphorylated serine
RMDSYVRSLFFRKNWLRLTW

SEQ ID NO: 7122 - protein, 20 aa, Artificial Sequence
  Description of Artificial Sequence: Synthetic peptide
  MOD_RES (4)..(4): phosphorylated serine
RMDSYVRSVFFRKNWLRLTW

SEQ ID NO: 7123 - protein, 20 aa, Artificial Sequence
  Description of Artificial Sequence: Synthetic peptide
  MOD_RES (5)..(5): phosphorylated threonine
RMFPTPPSLFFRKNWLRLTW

SEQ ID NO: 7124 - protein, 21 aa, Artificial Sequence
  Description of Artificial Sequence: Synthetic peptide
  MOD_RES (4)..(4): phosphorylated serine
RMFSFSKTPKFFRKNWLRLTW

SEQ ID NO: 7125 - protein, 20 aa, Artificial Sequence
  Description of Artificial Sequence: Synthetic peptide
  MOD_RES (4)..(4): phosphorylated serine
RMFSKELRCFFRKNWLRLTW

SEQ ID NO: 7126 - protein, 20 aa, Artificial Sequence
  Description of Artificial Sequence: Synthetic peptide
  MOD_RES (4)..(4): phosphorylated serine
RMFSKELRVFFRKNWLRLTW

SEQ ID NO: 7127 - protein, 20 aa, Artificial Sequence
  Description of Artificial Sequence: Synthetic peptide
  MOD_RES (4)..(4): phosphorylated serine
RMFSPMEEKFFRKNWLRLTW

SEQ ID NO: 7128 - protein, 23 aa, Artificial Sequence
  Description of Artificial Sequence: Synthetic peptide
  MOD_RES (4)..(4): phosphorylated serine
RMFSPMEEKELLFFRKNWLRLTW

SEQ ID NO: 7129 - protein, 20 aa, Artificial Sequence
  Description of Artificial Sequence: Synthetic peptide
  MOD_RES (4)..(4): phosphorylated serine
RMFSPTYGLFFRKNWLRLTW

SEQ ID NO: 7130 - protein, 20 aa, Artificial Sequence
  Description of Artificial Sequence: Synthetic peptide
  MOD_RES (4)..(4): phosphorylated serine
RMFSPTYGVFFRKNWLRLTW

SEQ ID NO: 7131 - protein, 20 aa, Artificial Sequence
  Description of Artificial Sequence: Synthetic peptide
  MOD_RES (4)..(4): phosphorylated serine
RMISPYKKKFFRKNWLRLTW

SEQ ID NO: 7132 - protein, 20 aa, Artificial Sequence
  Description of Artificial Sequence: Synthetic peptide
  MOD_RES (4)..(4): phosphorylated serine
RMISQDVKLFFRKNWLRLTW

SEQ ID NO: 7133 - protein, 20 aa, Artificial Sequence
  Description of Artificial Sequence: Synthetic peptide
  MOD_RES (4)..(4): phosphorylated serine
RMISQDVKVFFRKNWLRLTW

SEQ ID NO: 7134 - protein, 20 aa, Artificial Sequence
  Description of Artificial Sequence: Synthetic peptide
  MOD_RES (4)..(4): phosphorylated serine
RMISTGSELFFRKNWLRLTW

SEQ ID NO: 7135 - protein, 20 aa, Artificial Sequence
  Description of Artificial Sequence: Synthetic peptide
  MOD_RES (6)..(6): phosphorylated serine
RMKLPSGSKFFRKNWLRLTW

SEQ ID NO: 7136 - protein, 21 aa, Artificial Sequence
  Description of Artificial Sequence: Synthetic peptide
  MOD_RES (6)..(6): phosphorylated serine
RMKLPSGSKKFFRKNWLRLTW

SEQ ID NO: 7137 - protein, 21 aa, Artificial Sequence
  Description of Artificial Sequence: Synthetic peptide
  MOD_RES (6)..(6): phosphorylated serine
RMKLPSGSKYFFRKNWLRLTW

SEQ ID NO: 7138 - protein, 20 aa, Artificial Sequence
  Description of Artificial Sequence: Synthetic peptide
  MOD_RES (4)..(4): phosphorylated serine
RMKSPFRKKFFRKNWLRLTW

SEQ ID NO: 7139 - protein, 22 aa, Artificial Sequence
  Description of Artificial Sequence: Synthetic peptide
  MOD_RES (4)..(4): phosphorylated serine
  MOD_RES (7)..(7): phosphorylated serine
RMKSPGSGHVKFFRKNWLRLTW

SEQ ID NO: 7140 - protein, 22 aa, Artificial Sequence
  Description of Artificial Sequence: Synthetic peptide
  MOD_RES (4)..(4): phosphorylated serine
RMKSPSPKSEKFFRKNWLRLTW

SEQ ID NO: 7141 - protein, 22 aa, Artificial Sequence
  Description of Artificial Sequence: Synthetic peptide
  MOD_RES (4)..(4): phosphorylated threonine
RMKTPTSQSYKFFRKNWLRLTW

SEQ ID NO: 7142 - protein, 22 aa, Artificial Sequence
  Description of Artificial Sequence: Synthetic peptide
  MOD_RES (4)..(4): phosphorylated threonine
RMKTPTSQSYRFFRKNWLRLTW

SEQ ID NO: 7143 - protein, 20 aa, Artificial Sequence
  Description of Artificial Sequence: Synthetic peptide
  MOD_RES (5)..(5): phosphorylated threonine
RMKTTPLRKFFRKNWLRLTW

SEQ ID NO: 7144 - protein, 20 aa, Artificial Sequence
  Description of Artificial Sequence: Synthetic peptide
  MOD_RES (5)..(5): phosphorylated threonine
RMKTTPLRRFFRKNWLRLTW

SEQ ID NO: 7145 - protein, 23 aa, Artificial Sequence
  Description of Artificial Sequence: Synthetic peptide
  MOD_RES (8)..(8): phosphorylated serine
RMLDRSPSRSAKFFRKNWLRLTW

SEQ ID NO: 7146 - protein, 23 aa, Artificial Sequence
  Description of Artificial Sequence: Synthetic peptide
  MOD_RES (8)..(8): phosphorylated serine
RMLDRSPSRSAYFFRKNWLRLTW

SEQ ID NO: 7147 - protein, 20 aa, Artificial Sequence
  Description of Artificial Sequence: Synthetic peptide
  MOD_RES (4)..(4): phosphorylated serine
RMLSHISEAFFRKNWLRLTW

SEQ ID NO: 7148 - protein, 20 aa, Artificial Sequence
  Description of Artificial Sequence: Synthetic peptide
  MOD_RES (4)..(4): phosphorylated serine
RMLSHISEVFFRKNWLRLTW

SEQ ID NO: 7149 - protein, 21 aa, Artificial Sequence
  Description of Artificial Sequence: Synthetic peptide
  MOD_RES (4)..(4): phosphorylated serine
RMLSLRDQRLFFRKNWLRLTW

SEQ ID NO: 7150 - protein, 20 aa, Artificial Sequence
  Description of Artificial Sequence: Synthetic peptide
  MOD_RES (4)..(4): phosphorylated serine
RMLSPLSSAFFRKNWLRLTW

SEQ ID NO: 7151 - protein, 20 aa, Artificial Sequence
  Description of Artificial Sequence: Synthetic peptide
  MOD_RES (4)..(4): phosphorylated serine
RMLSPLSSVFFRKNWLRLTW

SEQ ID NO: 7152 - protein, 21 aa, Artificial Sequence
  Description of Artificial Sequence: Synthetic peptide
  MOD_RES (4)..(4): phosphorylated serine
RMLSPSMASKFFRKNWLRLTW

SEQ ID NO: 7153 - protein, 21 aa, Artificial Sequence
  Description of Artificial Sequence: Synthetic peptide
  MOD_RES (4)..(4): phosphorylated serine
RMLSSGVSEIFFRKNWLRLTW

SEQ ID NO: 7154 - protein, 21 aa, Artificial Sequence
  Description of Artificial Sequence: Synthetic peptide
  MOD_RES (4)..(4): phosphorylated serine
RMLSSGVSEVFFRKNWLRLTW

SEQ ID NO: 7155 - protein, 20 aa, Artificial Sequence
  Description of Artificial Sequence: Synthetic peptide
  MOD_RES (4)..(4): phosphorylated serine
RMLSVILIKFFRKNWLRLTW

SEQ ID NO: 7156 - protein, 21 aa, Artificial Sequence
  Description of Artificial Sequence: Synthetic peptide
  MOD_RES (4)..(4): phosphorylated serine
RMPSFLKKNKFFRKNWLRLTW

SEQ ID NO: 7157 - protein, 20 aa, Artificial Sequence
  Description of Artificial Sequence: Synthetic peptide
  MOD_RES (4)..(4): phosphorylated serine
RMPSSTLKKFFRKNWLRLTW

SEQ ID NO: 7158 - protein, 20 aa, Artificial Sequence
  Description of Artificial Sequence: Synthetic peptide
  MOD_RES (4)..(4): phosphorylated serine
RMPSSTLKRFFRKNWLRLTW

SEQ ID NO: 7159 - protein, 20 aa, Artificial Sequence
  Description of Artificial Sequence: Synthetic peptide
  MOD_RES (4)..(4): phosphorylated serine
RMQSTSERLFFRKNWLRLTW

SEQ ID NO: 7160 - protein, 20 aa, Artificial Sequence
  Description of Artificial Sequence: Synthetic peptide
  MOD_RES (4)..(4): phosphorylated serine
RMQSTSERVFFRKNWLRLTW

SEQ ID NO: 7161 - protein, 21 aa, Artificial Sequence
  Description of Artificial Sequence: Synthetic peptide
  MOD_RES (5)..(5): phosphorylated serine
RMRQSPLATKFFRKNWLRLTW

SEQ ID NO: 7162 - protein, 21 aa, Artificial Sequence
  Description of Artificial Sequence: Synthetic peptide
  MOD_RES (5)..(5): phosphorylated serine
RMRQSPLATRFFRKNWLRLTW

SEQ ID NO: 7163 - protein, 20 aa, Artificial Sequence
  Description of Artificial Sequence: Synthetic peptide
  MOD_RES (5)..(5): phosphorylated serine
RMRRSPLLKFFRKNWLRLTW

SEQ ID NO: 7164 - protein, 21 aa, Artificial Sequence
  Description of Artificial Sequence: Synthetic peptide
  MOD_RES (4)..(4): phosphorylated serine
RMRSAGAAQKFFRKNWLRLTW

SEQ ID NO: 7165 - protein, 22 aa, Artificial Sequence
  Description of Artificial Sequence: Synthetic peptide
  MOD_RES (4)..(4): phosphorylated serine
RMRSLSSLREKFFRKNWLRLTW

SEQ ID NO: 7166 - protein, 21 aa, Artificial Sequence
  Description of Artificial Sequence: Synthetic peptide
  MOD_RES (4)..(4): phosphorylated serine
RMRSPPPVSKFFRKNWLRLTW

SEQ ID NO: 7167 - protein, 21 aa, Artificial Sequence
  Description of Artificial Sequence: Synthetic peptide
  MOD_RES (5)..(5): phosphorylated serine
RMRTSPITRKFFRKNWLRLTW

SEQ ID NO: 7168 - protein, 21 aa, Artificial Sequence
  Description of Artificial Sequence: Synthetic peptide
  MOD_RES (5)..(5): phosphorylated serine
RMRTSPITRRFFRKNWLRLTW

SEQ ID NO: 7169 - protein, 20 aa, Artificial Sequence
  Description of Artificial Sequence: Synthetic peptide
  MOD_RES (4)..(4): phosphorylated serine
RMSSLIRHKFFRKNWLRLTW

SEQ ID NO: 7170 - protein, 20 aa, Artificial Sequence
  Description of Artificial Sequence: Synthetic peptide
  MOD_RES (4)..(4): phosphorylated serine
RMSSPISKKFFRKNWLRLTW

SEQ ID NO: 7171 - protein, 20 aa, Artificial Sequence
  Description of Artificial Sequence: Synthetic peptide
  MOD_RES (4)..(4): phosphorylated serine
RMSSPISKRFFRKNWLRLTW

SEQ ID NO: 7172 - protein, 20 aa, Artificial Sequence
  Description of Artificial Sequence: Synthetic peptide
  MOD_RES (4)..(4): phosphorylated serine
RMSSPLHFVFFRKNWLRLTW

SEQ ID NO: 7173 - protein, 20 aa, Artificial Sequence
  Description of Artificial Sequence: Synthetic peptide
  MOD_RES (4)..(4): phosphorylated serine
RMSSPVLHKFFRKNWLRLTW

SEQ ID NO: 7174 - protein, 20 aa, Artificial Sequence
  Description of Artificial Sequence: Synthetic peptide
  MOD_RES (4)..(4): phosphorylated serine
RMSSRYSQKFFRKNWLRLTW

SEQ ID NO: 7175 - protein, 21 aa, Artificial Sequence
  Description of Artificial Sequence: Synthetic peptide
  MOD_RES (4)..(4): phosphorylated serine
RMSSVKLISKFFRKNWLRLTW

SEQ ID NO: 7176 - protein, 21 aa, Artificial Sequence
  Description of Artificial Sequence: Synthetic peptide
  MOD_RES (4)..(4): phosphorylated serine
RMSSVKLISYFFRKNWLRLTW

SEQ ID NO: 7177 - protein, 20 aa, Artificial Sequence
  Description of Artificial Sequence: Synthetic peptide
  MOD_RES (4)..(4): phosphorylated serine
RMVSLSMRKFFRKNWLRLTW

SEQ ID NO: 7178 - protein, 20 aa, Artificial Sequence
  Description of Artificial Sequence: Synthetic peptide
  MOD_RES (4)..(4): phosphorylated serine
RMVSLSMRYFFRKNWLRLTW

SEQ ID NO: 7179 - protein, 20 aa, Artificial Sequence
  Description of Artificial Sequence: Synthetic peptide
  MOD_RES (5)..(5): phosphorylated serine
RMYKSPLRHFFRKNWLRLTW

SEQ ID NO: 7180 - protein, 20 aa, Artificial Sequence
  Description of Artificial Sequence: Synthetic peptide
  MOD_RES (5)..(5): phosphorylated serine
RMYKSPLRKFFRKNWLRLTW

SEQ ID NO: 7181 - protein, 20 aa, Artificial Sequence
  Description of Artificial Sequence: Synthetic peptide
  MOD_RES (5)..(5): phosphorylated tyrosine
RMYQYIQSKFFRKNWLRLTW

SEQ ID NO: 7182 - protein, 20 aa, Artificial Sequence
  Description of Artificial Sequence: Synthetic peptide
  MOD_RES (5)..(5): phosphorylated tyrosine
RMYQYIQSRFFRKNWLRLTW

SEQ ID NO: 7183 - protein, 21 aa, Artificial Sequence
  Description of Artificial Sequence: Synthetic peptide
  MOD_RES (5)..(5): phosphorylated tyrosine
RMYQYLQSRFFFRKNWLRLTW

SEQ ID NO: 7184 - protein, 22 aa, Artificial Sequence
  Description of Artificial Sequence: Synthetic peptide
  MOD_RES (5)..(5): phosphorylated tyrosine
RMYQYLQSRFKFFRKNWLRLTW

SEQ ID NO: 7185 - protein, 22 aa, Artificial Sequence
  Description of Artificial Sequence: Synthetic peptide
  MOD_RES (5)..(5): phosphorylated tyrosine
RMYQYLQSRFYFFRKNWLRLTW

SEQ ID NO: 7186 - protein, 21 aa, Artificial Sequence
  Description of Artificial Sequence: Synthetic peptide
  MOD_RES (5)..(5): phosphorylated tyrosine
RMYQYLQSRKFFRKNWLRLTW

SEQ ID NO: 7187 - protein, 20 aa, Artificial Sequence
  Description of Artificial Sequence: Synthetic peptide
  MOD_RES (4)..(4): phosphorylated serine
RMYSFDDVLFFRKNWLRLTW

SEQ ID NO: 7188 - protein, 20 aa, Artificial Sequence
  Description of Artificial Sequence: Synthetic peptide
  MOD_RES (4)..(4): phosphorylated serine
  MOD_RES (8)..(8): phosphorylated serine
RMYSGSRSKFFRKNWLRLTW

SEQ ID NO: 7189 - protein, 20 aa, Artificial Sequence
  Description of Artificial Sequence: Synthetic peptide
  MOD_RES (4)..(4): phosphorylated serine
  MOD_RES (8)..(8): phosphorylated serine
RMYSGSRSRFFRKNWLRLTW

SEQ ID NO: 7190 - protein, 20 aa, Artificial Sequence
  Description of Artificial Sequence: Synthetic peptide
  MOD_RES (4)..(4): phosphorylated serine
RMYSKSRDHFFRKNWLRLTW

SEQ ID NO: 7191 - protein, 20 aa, Artificial Sequence
  Description of Artificial Sequence: Synthetic peptide
  MOD_RES (4)..(4): phosphorylated serine
RMYSKSRDKFFRKNWLRLTW

SEQ ID NO: 7192 - protein, 20 aa, Artificial Sequence
  Description of Artificial Sequence: Synthetic peptide
  MOD_RES (4)..(4): phosphorylated serine
RMYSKSRDYFFRKNWLRLTW

SEQ ID NO: 7193 - protein, 21 aa, Artificial Sequence
  Description of Artificial Sequence: Synthetic peptide
  MOD_RES (4)..(4): phosphorylated serine
RMYSPDHRQKFFRKNWLRLTW

SEQ ID NO: 7194 - protein, 20 aa, Artificial Sequence
  Description of Artificial Sequence: Synthetic peptide
  MOD_RES (4)..(4): phosphorylated serine
RMYSPERSKFFRKNWLRLTW

SEQ ID NO: 7195 - protein, 21 aa, Artificial Sequence
  Description of Artificial Sequence: Synthetic peptide
  MOD_RES (4)..(4): phosphorylated serine
RMYSPIIYQAFFRKNWLRLTW

SEQ ID NO: 7196 - protein, 21 aa, Artificial Sequence
  Description of Artificial Sequence: Synthetic peptide
  MOD_RES (4)..(4): phosphorylated serine
RMYSPIPPSLFFRKNWLRLTW

SEQ ID NO: 7197 - protein, 20 aa, Artificial Sequence
  Description of Artificial Sequence: Synthetic peptide
  MOD_RES (4)..(4): phosphorylated serine
RMYSPRNSKFFRKNWLRLTW

SEQ ID NO: 7198 - protein, 20 aa, Artificial Sequence
  Description of Artificial Sequence: Synthetic peptide
  MOD_RES (4)..(4): phosphorylated serine
RMYSPYNHKFFRKNWLRLTW

SEQ ID NO: 7199 - protein, 20 aa, Artificial Sequence
  Description of Artificial Sequence: Synthetic peptide
  MOD_RES (4)..(4): phosphorylated serine
RMYSPYNHRFFRKNWLRLTW

SEQ ID NO: 7200 - protein, 20 aa, Artificial Sequence
  Description of Artificial Sequence: Synthetic peptide
  MOD_RES (4)..(4): phosphorylated serine
RMYSYPRQKFFRKNWLRLTW

SEQ ID NO: 7201 - protein, 25 aa, Artificial Sequence
  Description of Artificial Sequence: Synthetic peptide
  MOD_RES (12)..(12): phosphorylated serine
RMYVTTSTRTYSLGFFRKNWLRLTW

SEQ ID NO: 7202 - protein, 25 aa, Artificial Sequence
  Description of Artificial Sequence: Synthetic peptide
  MOD_RES (12)..(12): phosphorylated serine
RMYVTTSTRTYSLKFFRKNWLRLTW

SEQ ID NO: 7203 - protein, 25 aa, Artificial Sequence
  Description of Artificial Sequence: Synthetic peptide
  MOD_RES (12)..(12): phosphorylated serine
RMYVTTSTRTYSLYFFRKNWLRLTW

SEQ ID NO: 7204 - protein, 20 aa, Artificial Sequence
  Description of Artificial Sequence: Synthetic peptide
  MOD_RES (4)..(4): phosphorylated serine
RNLSSPFIFFFRKNWLRLTW

SEQ ID NO: 7205 - protein, 20 aa, Artificial Sequence
  Description of Artificial Sequence: Synthetic peptide
  MOD_RES (6)..(6): phosphorylated serine
RPAFFSPSLFFRKNWLRLTW

SEQ ID NO: 7206 - protein, 20 aa, Artificial Sequence
  Description of Artificial Sequence: Synthetic peptide
  MOD_RES (5)..(5): phosphorylated serine
RPAKSMDSFFFRKNWLRLTW

SEQ ID NO: 7207 - protein, 20 aa, Artificial Sequence
  Description of Artificial Sequence: Synthetic peptide
  MOD_RES (5)..(5): phosphorylated serine
RPAKSMDSLFFRKNWLRLTW

SEQ ID NO: 7208 - protein, 20 aa, Artificial Sequence
  Description of Artificial Sequence: Synthetic peptide
  MOD_RES (5)..(5): phosphorylated serine
RPAKSMDSMFFRKNWLRLTW

SEQ ID NO: 7209 - protein, 19 aa, Artificial Sequence
  Description of Artificial Sequence: Synthetic peptide
  MOD_RES (5)..(5): phosphorylated serine
RPAKSMDVFFRKNWLRLTW

SEQ ID NO: 7210 - protein, 20 aa, Artificial Sequence
  Description of Artificial Sequence: Synthetic peptide
  MOD_RES (4)..(4): phosphorylated serine
RPASAGAMFFFRKNWLRLTW

SEQ ID NO: 7211 - protein, 20 aa, Artificial Sequence
  Description of Artificial Sequence: Synthetic peptide
  MOD_RES (4)..(4): phosphorylated serine
  MOD_RES (8)..(8): oxidized methionine
RPASAGAMLFFRKNWLRLTW

SEQ ID NO: 7212 - protein, 20 aa, Artificial Sequence
  Description of Artificial Sequence: Synthetic peptide
  MOD_RES (4)..(4): phosphorylated serine
RPASAGAMLFFRKNWLRLTW

SEQ ID NO: 7213 - protein, 20 aa, Artificial Sequence
  Description of Artificial Sequence: Synthetic peptide
  MOD_RES (4)..(4): phosphorylated serine
RPASAGAMMFFRKNWLRLTW

SEQ ID NO: 7214 - protein, 20 aa, Artificial Sequence
  Description of Artificial Sequence: Synthetic peptide
  MOD_RES (4)..(4): phosphorylated serine
RPASAGAMVFFRKNWLRLTW

SEQ ID NO: 7215 - protein, 22 aa, Artificial Sequence
  Description of Artificial Sequence: Synthetic peptide
  MOD_RES (4)..(4): phosphorylated serine
RPASARAQPGFFFRKNWLRLTW

SEQ ID NO: 7216 - protein, 22 aa, Artificial Sequence
  Description of Artificial Sequence: Synthetic peptide
  MOD_RES (4)..(4): phosphorylated serine
RPASARAQPGLFFRKNWLRLTW

SEQ ID NO: 7217 - protein, 22 aa, Artificial Sequence
  Description of Artificial Sequence: Synthetic peptide
  MOD_RES (4)..(4): phosphorylated serine
RPASARAQPGMFFRKNWLRLTW

SEQ ID NO: 7218 - protein, 22 aa, Artificial Sequence
  Description of Artificial Sequence: Synthetic peptide
  MOD_RES (4)..(4): phosphorylated serine
RPASARAQPGVFFRKNWLRLTW

SEQ ID NO: 7219 - protein, 22 aa, Artificial Sequence
  Description of Artificial Sequence: Synthetic peptide
  MOD_RES (4)..(4): phosphorylated serine
RPASEARAPGLFFRKNWLRLTW

SEQ ID NO: 7220 - protein, 20 aa, Artificial Sequence
  Description of Artificial Sequence: Synthetic peptide
  MOD_RES (4)..(4): phosphorylated serine
RPASPAAKFFFRKNWLRLTW

SEQ ID NO: 7221 - protein, 20 aa, Artificial Sequence
  Description of Artificial Sequence: Synthetic peptide
  MOD_RES (4)..(4): phosphorylated serine
RPASPAAKLFFRKNWLRLTW

SEQ ID NO: 7222 - protein, 20 aa, Artificial Sequence
  Description of Artificial Sequence: Synthetic peptide
  MOD_RES (4)..(4): phosphorylated serine
RPASPAAKMFFRKNWLRLTW

SEQ ID NO: 7223 - protein, 20 aa, Artificial Sequence
  Description of Artificial Sequence: Synthetic peptide
  MOD_RES (4)..(4): phosphorylated serine
RPASPAAKVFFRKNWLRLTW

SEQ ID NO: 7224 - protein, 20 aa, Artificial Sequence
  Description of Artificial Sequence: Synthetic peptide
  MOD_RES (4)..(4): phosphorylated serine
RPASPEPELFFRKNWLRLTW

SEQ ID NO: 7225 - protein, 20 aa, Artificial Sequence
  Description of Artificial Sequence: Synthetic peptide
  MOD_RES (4)..(4): phosphorylated serine
RPASPGPSLFFRKNWLRLTW

SEQ ID NO: 7226 - protein, 21 aa, Artificial Sequence
  Description of Artificial Sequence: Synthetic peptide
  MOD_RES (4)..(4): phosphorylated serine
RPASPKRAKIFFRKNWLRLTW

SEQ ID NO: 7227 - protein, 21 aa, Artificial Sequence
  Description of Artificial Sequence: Synthetic peptide
  MOD_RES (4)..(4): phosphorylated serine
RPASPKRAKLFFRKNWLRLTW

SEQ ID NO: 7228 - protein, 21 aa, Artificial Sequence
  Description of Artificial Sequence: Synthetic peptide
  MOD_RES (4)..(4): phosphorylated serine
  MOD_RES (10)..(10): Any amino acid
RPASPKRAKXFFRKNWLRLTW

SEQ ID NO: 7229 - protein, 21 aa, Artificial Sequence
  Description of Artificial Sequence: Synthetic peptide
  MOD_RES (4)..(4): phosphorylated serine
RPASPKRAQIFFRKNWLRLTW

SEQ ID NO: 7230 - protein, 21 aa, Artificial Sequence
  Description of Artificial Sequence: Synthetic peptide
  MOD_RES (4)..(4): phosphorylated serine
RPASPKRAQLFFRKNWLRLTW

SEQ ID NO: 7231 - protein, 21 aa, Artificial Sequence
  Description of Artificial Sequence: Synthetic peptide
  MOD_RES (4)..(4): phosphorylated serine
  MOD_RES (10)..(10): Any amino acid
RPASPKRAQXFFRKNWLRLTW

SEQ ID NO: 7232 - protein, 21 aa, Artificial Sequence
  Description of Artificial Sequence: Synthetic peptide
  MOD_RES (4)..(4): phosphorylated serine
RPASPQRAKIFFRKNWLRLTW

SEQ ID NO: 7233 - protein, 21 aa, Artificial Sequence
  Description of Artificial Sequence: Synthetic peptide
  MOD_RES (4)..(4): phosphorylated serine
RPASPQRAKLFFRKNWLRLTW

SEQ ID NO: 7234 - protein, 21 aa, Artificial Sequence
  Description of Artificial Sequence: Synthetic peptide
  MOD_RES (4)..(4): phosphorylated serine
  MOD_RES (10)..(10): Any amino acid
RPASPQRAKXFFRKNWLRLTW

SEQ ID NO: 7235 - protein, 21 aa, Artificial Sequence
  Description of Artificial Sequence: Synthetic peptide
  MOD_RES (4)..(4): phosphorylated serine
RPASPQRAQIFFRKNWLRLTW

SEQ ID NO: 7236 - protein, 21 aa, Artificial Sequence
  Description of Artificial Sequence: Synthetic peptide
  MOD_RES (4)..(4): phosphorylated serine
RPASPQRAQLFFRKNWLRLTW

SEQ ID NO: 7237 - protein, 21 aa, Artificial Sequence
  Description of Artificial Sequence: Synthetic peptide
  MOD_RES (4)..(4): phosphorylated serine
  MOD_RES (10)..(10): Any amino acid
RPASPQRAQXFFRKNWLRLTW

SEQ ID NO: 7238 - protein, 20 aa, Artificial Sequence
  Description of Artificial Sequence: Synthetic peptide
  MOD_RES (4)..(4): phosphorylated serine
RPASPSLQLFFRKNWLRLTW

SEQ ID NO: 7239 - protein, 21 aa, Artificial Sequence
  Description of Artificial Sequence: Synthetic peptide
  MOD_RES (4)..(4): phosphorylated serine
RPASPSLQLLFFRKNWLRLTW

SEQ ID NO: 7240 - protein, 30 aa, Artificial Sequence
  Description of Artificial Sequence: Synthetic polypeptide
  MOD_RES (4)..(4): phosphorylated serine
  MOD_RES (6)..(6): phosphorylated threonine
RPASPTAIRRIGSVTSRQTFFRKNWLRLTW

SEQ ID NO: 7241 - protein, 20 aa, Artificial Sequence
  Description of Artificial Sequence: Synthetic peptide
  MOD_RES (4)..(4): phosphorylated serine
RPASRFEVLFFRKNWLRLTW

SEQ ID NO: 7242 - protein, 22 aa, Artificial Sequence
  Description of Artificial Sequence: Synthetic peptide
  MOD_RES (4)..(4): phosphorylated serine
RPASYKKKSMLFFRKNWLRLTW

SEQ ID NO: 7243 - protein, 21 aa, Artificial Sequence
  Description of Artificial Sequence: Synthetic peptide
  MOD_RES (4)..(4): phosphorylated threonine
RPATGGPGVAFFRKNWLRLTW

SEQ ID NO: 7244 - protein, 21 aa, Artificial Sequence
  Description of Artificial Sequence: Synthetic peptide
  MOD_RES (4)..(4): phosphorylated threonine
RPATGGPGVFFFRKNWLRLTW

SEQ ID NO: 7245 - protein, 21 aa, Artificial Sequence
  Description of Artificial Sequence: Synthetic peptide
  MOD_RES (4)..(4): phosphorylated threonine
RPATGGPGVLFFRKNWLRLTW

SEQ ID NO: 7246 - protein, 21 aa, Artificial Sequence
  Description of Artificial Sequence: Synthetic peptide
  MOD_RES (4)..(4): phosphorylated threonine
RPATGGPGVMFFRKNWLRLTW

SEQ ID NO: 7247 - protein, 21 aa, Artificial Sequence
  Description of Artificial Sequence: Synthetic peptide
  MOD_RES (4)..(4): phosphorylated threonine
RPATGGPGVVFFRKNWLRLTW

SEQ ID NO: 7248 - protein, 20 aa, Artificial Sequence
  Description of Artificial Sequence: Synthetic peptide
  MOD_RES (4)..(4): phosphorylated threonine
RPATPTSQFFFRKNWLRLTW

SEQ ID NO: 7249 - protein, 20 aa, Artificial Sequence
  Description of Artificial Sequence: Synthetic peptide
  MOD_RES (4)..(4): phosphorylated threonine
RPATPTSQLFFRKNWLRLTW

SEQ ID NO: 7250 - protein, 20 aa, Artificial Sequence
  Description of Artificial Sequence: Synthetic peptide
  MOD_RES (4)..(4): phosphorylated threonine
RPATPTSQMFFRKNWLRLTW

SEQ ID NO: 7251 - protein, 20 aa, Artificial Sequence
  Description of Artificial Sequence: Synthetic peptide
  MOD_RES (4)..(4): phosphorylated threonine
RPATPTSQVFFRKNWLRLTW

SEQ ID NO: 7252 - protein, 20 aa, Artificial Sequence
  Description of Artificial Sequence: Synthetic peptide
  MOD_RES (4)..(4): phosphorylated serine
RPDSAHKMLFFRKNWLRLTW

SEQ ID NO: 7253 - protein, 21 aa, Artificial Sequence
  Description of Artificial Sequence: Synthetic peptide
  MOD_RES (4)..(4): phosphorylated serine
RPDSPTRPTLFFRKNWLRLTW

SEQ ID NO: 7254 - protein, 22 aa, Artificial Sequence
  Description of Artificial Sequence: Synthetic peptide
  MOD_RES (4)..(4): phosphorylated serine
RPDSRLGKTEFFFRKNWLRLTW

SEQ ID NO: 7255 - protein, 22 aa, Artificial Sequence
  Description of Artificial Sequence: Synthetic peptide
  MOD_RES (4)..(4): phosphorylated serine
RPDSRLGKTELFFRKNWLRLTW

SEQ ID NO: 7256 - protein, 22 aa, Artificial Sequence
  Description of Artificial Sequence: Synthetic peptide
  MOD_RES (4)..(4): phosphorylated serine
RPDSRLGKTEMFFRKNWLRLTW

SEQ ID NO: 7257 - protein, 22 aa, Artificial Sequence
  Description of Artificial Sequence: Synthetic peptide
  MOD_RES (4)..(4): phosphorylated serine
RPDSRLGKTEVFFRKNWLRLTW

SEQ ID NO: 7258 - protein, 21 aa, Artificial Sequence
  Description of Artificial Sequence: Synthetic peptide
  MOD_RES (9)..(9): phosphorylated serine
RPDVAKRLSLFFRKNWLRLTW

SEQ ID NO: 7259 - protein, 21 aa, Artificial Sequence
  Description of Artificial Sequence: Synthetic peptide
  MOD_RES (4)..(4): phosphorylated serine
RPESDSGLKFFFRKNWLRLTW

SEQ ID NO: 7260 - protein, 21 aa, Artificial Sequence
  Description of Artificial Sequence: Synthetic peptide
  MOD_RES (4)..(4): phosphorylated serine
RPESDSGLKLFFRKNWLRLTW

SEQ ID NO: 7261 - protein, 21 aa, Artificial Sequence
  Description of Artificial Sequence: Synthetic peptide
  MOD_RES (4)..(4): phosphorylated serine
RPESDSGLKMFFRKNWLRLTW

SEQ ID NO: 7262 - protein, 21 aa, Artificial Sequence
  Description of Artificial Sequence: Synthetic peptide
  MOD_RES (4)..(4): phosphorylated serine
RPESDSGLKVFFRKNWLRLTW

SEQ ID NO: 7263 - protein, 20 aa, Artificial Sequence
  Description of Artificial Sequence: Synthetic peptide
  MOD_RES (4)..(4): phosphorylated serine
RPESKDRKFFFRKNWLRLTW

SEQ ID NO: 7264 - protein, 20 aa, Artificial Sequence
  Description of Artificial Sequence: Synthetic peptide
  MOD_RES (4)..(4): phosphorylated serine
RPESKDRKLFFRKNWLRLTW

SEQ ID NO: 7265 - protein, 20 aa, Artificial Sequence
  Description of Artificial Sequence: Synthetic peptide
  MOD_RES (4)..(4): phosphorylated serine
RPESKDRKMFFRKNWLRLTW

SEQ ID NO: 7266 - protein, 20 aa, Artificial Sequence
  Description of Artificial Sequence: Synthetic peptide
  MOD_RES (4)..(4): phosphorylated serine
RPESKDRKVFFRKNWLRLTW

SEQ ID NO: 7267 - protein, 20 aa, Artificial Sequence
  Description of Artificial Sequence: Synthetic peptide
  MOD_RES (6)..(6): phosphorylated serine
RPFARSHSFFFRKNWLRLTW

SEQ ID NO: 7268 - protein, 20 aa, Artificial Sequence
  Description of Artificial Sequence: Synthetic peptide
  MOD_RES (8)..(8): phosphorylated serine
RPFARSHSFFFRKNWLRLTW

SEQ ID NO: 7269 - protein, 22 aa, Artificial Sequence
  Description of Artificial Sequence: Synthetic peptide
  MOD_RES (10)..(10): phosphorylated serine
RPFHGISTVSLFFRKNWLRLTW

SEQ ID NO: 7270 - protein, 20 aa, Artificial Sequence
  Description of Artificial Sequence: Synthetic peptide
  MOD_RES (4)..(4): phosphorylated serine
RPFSPREAFFFRKNWLRLTW

SEQ ID NO: 7271 - protein, 20 aa, Artificial Sequence
  Description of Artificial Sequence: Synthetic peptide
  MOD_RES (4)..(4): phosphorylated serine
RPFSPREALFFRKNWLRLTW

SEQ ID NO: 7272 - protein, 20 aa, Artificial Sequence
  Description of Artificial Sequence: Synthetic peptide
  MOD_RES (4)..(4): phosphorylated serine
RPFSPREAMFFRKNWLRLTW

SEQ ID NO: 7273 - protein, 20 aa, Artificial Sequence
  Description of Artificial Sequence: Synthetic peptide
  MOD_RES (4)..(4): phosphorylated serine
RPFSPREAVFFRKNWLRLTW

SEQ ID NO: 7274 - protein, 20 aa, Artificial Sequence
  Description of Artificial Sequence: Synthetic peptide
  MOD_RES (4)..(4): phosphorylated serine
RPGSLERKFFFRKNWLRLTW

SEQ ID NO: 7275 - protein, 20 aa, Artificial Sequence
  Description of Artificial Sequence: Synthetic peptide
  MOD_RES (4)..(4): phosphorylated serine
RPGSLERKLFFRKNWLRLTW

SEQ ID NO: 7276 - protein, 20 aa, Artificial Sequence
  Description of Artificial Sequence: Synthetic peptide
  MOD_RES (4)..(4): phosphorylated serine
RPGSLERKMFFRKNWLRLTW

SEQ ID NO: 7277 - protein, 20 aa, Artificial Sequence
  Description of Artificial Sequence: Synthetic peptide
  MOD_RES (4)..(4): phosphorylated serine
RPGSLERKVFFRKNWLRLTW

SEQ ID NO: 7278 - protein, 20 aa, Artificial Sequence
  Description of Artificial Sequence: Synthetic peptide
  MOD_RES (4)..(4): phosphorylated serine
RPGSRQAGLFFRKNWLRLTW

SEQ ID NO: 7279 - protein, 20 aa, Artificial Sequence
  Description of Artificial Sequence: Synthetic peptide
  MOD_RES (4)..(4): phosphorylated serine
RPGSRQAGLFFRKNWLRLTW

SEQ ID NO: 7280 - protein, 20 aa, Artificial Sequence
  Description of Artificial Sequence: Synthetic peptide
  MOD_RES (4)..(4): phosphorylated serine
RPHSPEKAFFFRKNWLRLTW

SEQ ID NO: 7281 - protein, 20 aa, Artificial Sequence
  Description of Artificial Sequence: Synthetic peptide
  MOD_RES (4)..(4): phosphorylated serine
RPHSPEKALFFRKNWLRLTW

SEQ ID NO: 7282 - protein, 20 aa, Artificial Sequence
  Description of Artificial Sequence: Synthetic peptide
  MOD_RES (4)..(4): phosphorylated serine
RPHSPEKAMFFRKNWLRLTW

SEQ ID NO: 7283 - protein, 20 aa, Artificial Sequence
  Description of Artificial Sequence: Synthetic peptide
  MOD_RES (4)..(4): phosphorylated serine
RPHSPEKAVFFRKNWLRLTW

SEQ ID NO: 7284 - protein, 21 aa, Artificial Sequence
  Description of Artificial Sequence: Synthetic peptide
  MOD_RES (4)..(4): phosphorylated threonine
RPHTPTGIYMFFRKNWLRLTW

SEQ ID NO: 7285 - protein, 22 aa, Artificial Sequence
  Description of Artificial Sequence: Synthetic peptide
  MOD_RES (4)..(4): phosphorylated threonine
RPHTPTPGIYMFFRKNWLRLTW

SEQ ID NO: 7286 - protein, 20 aa, Artificial Sequence
  Description of Artificial Sequence: Synthetic peptide
  MOD_RES (4)..(4): phosphorylated serine
RPISPGLSFFFRKNWLRLTW

SEQ ID NO: 7287 - protein, 20 aa, Artificial Sequence
  Description of Artificial Sequence: Synthetic peptide
  MOD_RES (4)..(4): phosphorylated serine
RPISPGLSLFFRKNWLRLTW

SEQ ID NO: 7288 - protein, 20 aa, Artificial Sequence
  Description of Artificial Sequence: Synthetic peptide
  MOD_RES (4)..(4): phosphorylated serine
RPISPGLSMFFRKNWLRLTW

SEQ ID NO: 7289 - protein, 20 aa, Artificial Sequence
  Description of Artificial Sequence: Synthetic peptide
  MOD_RES (4)..(4): phosphorylated serine
RPISPGLSVFFRKNWLRLTW

SEQ ID NO: 7290 - protein, 20 aa, Artificial Sequence
  Description of Artificial Sequence: Synthetic peptide
  MOD_RES (4)..(4): phosphorylated serine
RPISPGLSYFFRKNWLRLTW

SEQ ID NO: 7291 - protein, 20 aa, Artificial Sequence
  Description of Artificial Sequence: Synthetic peptide
  MOD_RES (4)..(4): phosphorylated serine
RPISPPHTYFFRKNWLRLTW

SEQ ID NO: 7292 - protein, 21 aa, Artificial Sequence
  Description of Artificial Sequence: Synthetic peptide
  MOD_RES (4)..(4): phosphorylated serine
RPISPRIGALFFRKNWLRLTW

SEQ ID NO: 7293 - protein, 21 aa, Artificial Sequence
  Description of Artificial Sequence: Synthetic peptide
  MOD_RES (4)..(4): phosphorylated threonine
RPITPPRNSAFFRKNWLRLTW

SEQ ID NO: 7294 - protein, 21 aa, Artificial Sequence
  Description of Artificial Sequence: Synthetic peptide
  MOD_RES (4)..(4): phosphorylated threonine
RPITPPRNSFFFRKNWLRLTW

SEQ ID NO: 7295 - protein, 21 aa, Artificial Sequence
  Description of Artificial Sequence: Synthetic peptide
  MOD_RES (4)..(4): phosphorylated threonine
RPITPPRNSLFFRKNWLRLTW

SEQ ID NO: 7296 - protein, 21 aa, Artificial Sequence
  Description of Artificial Sequence: Synthetic peptide
  MOD_RES (4)..(4): phosphorylated threonine
RPITPPRNSMFFRKNWLRLTW

SEQ ID NO: 7297 - protein, 21 aa, Artificial Sequence
  Description of Artificial Sequence: Synthetic peptide
  MOD_RES (4)..(4): phosphorylated threonine
RPITPPRNSVFFRKNWLRLTW

SEQ ID NO: 7298 - protein, 20 aa, Artificial Sequence
  Description of Artificial Sequence: Synthetic peptide
  MOD_RES (6)..(6): phosphorylated serine
RPKLSSPAFFFRKNWLRLTW

SEQ ID NO: 7299 - protein, 20 aa, Artificial Sequence
  Description of Artificial Sequence: Synthetic peptide
  MOD_RES (6)..(6): phosphorylated serine
RPKLSSPALFFRKNWLRLTW

SEQ ID NO: 7300 - protein, 20 aa, Artificial Sequence
  Description of Artificial Sequence: Synthetic peptide
  MOD_RES (6)..(6): phosphorylated serine
RPKLSSPAMFFRKNWLRLTW

SEQ ID NO: 7301 - protein, 20 aa, Artificial Sequence
  Description of Artificial Sequence: Synthetic peptide
  MOD_RES (6)..(6): phosphorylated serine
RPKLSSPAVFFRKNWLRLTW

SEQ ID NO: 7302 - protein, 20 aa, Artificial Sequence
  Description of Artificial Sequence: Synthetic peptide
  MOD_RES (7)..(7): phosphorylated serine
RPKPSSSPFFFRKNWLRLTW

SEQ ID NO: 7303 - protein, 20 aa, Artificial Sequence
  Description of Artificial Sequence: Synthetic peptide
  MOD_RES (7)..(7): phosphorylated serine
RPKPSSSPLFFRKNWLRLTW

SEQ ID NO: 7304 - protein, 20 aa, Artificial Sequence
  Description of Artificial Sequence: Synthetic peptide
  MOD_RES (7)..(7): phosphorylated serine
RPKPSSSPMFFRKNWLRLTW

SEQ ID NO: 7305 - protein, 20 aa, Artificial Sequence
  Description of Artificial Sequence: Synthetic peptide
  MOD_RES (7)..(7): phosphorylated serine
RPKPSSSPVFFRKNWLRLTW

SEQ ID NO: 7306 - protein, 20 aa, Artificial Sequence
  Description of Artificial Sequence: Synthetic peptide
  MOD_RES (4)..(4): phosphorylated serine
RPKSNIVLFFFRKNWLRLTW

SEQ ID NO: 7307 - protein, 20 aa, Artificial Sequence
  Description of Artificial Sequence: Synthetic peptide
  MOD_RES (4)..(4): phosphorylated serine
RPKSNIVLLFFRKNWLRLTW

SEQ ID NO: 7308 - protein, 20 aa, Artificial Sequence
  Description of Artificial Sequence: Synthetic peptide
  MOD_RES (4)..(4): phosphorylated serine
RPKSNIVLMFFRKNWLRLTW

SEQ ID NO: 7309 - protein, 20 aa, Artificial Sequence
  Description of Artificial Sequence: Synthetic peptide
  MOD_RES (4)..(4): phosphorylated serine
RPKSNIVLVFFRKNWLRLTW

SEQ ID NO: 7310 - protein, 20 aa, Artificial Sequence
  Description of Artificial Sequence: Synthetic peptide
  MOD_RES (4)..(4): phosphorylated serine
  MOD_RES (9)..(9): oxidized methionine
RPKSPLSKMFFRKNWLRLTW

SEQ ID NO: 7311 - protein, 20 aa, Artificial Sequence
  Description of Artificial Sequence: Synthetic peptide
  MOD_RES (4)..(4): phosphorylated serine
RPKSPLSKMFFRKNWLRLTW

SEQ ID NO: 7312 - protein, 20 aa, Artificial Sequence
  Description of Artificial Sequence: Synthetic peptide
  MOD_RES (4)..(4): phosphorylated serine
RPKSQVAEFFFRKNWLRLTW

SEQ ID NO: 7313 - protein, 20 aa, Artificial Sequence
  Description of Artificial Sequence: Synthetic peptide
  MOD_RES (4)..(4): phosphorylated serine
RPKSQVAELFFRKNWLRLTW

SEQ ID NO: 7314 - protein, 20 aa, Artificial Sequence
  Description of Artificial Sequence: Synthetic peptide
  MOD_RES (4)..(4): phosphorylated serine
RPKSQVAEMFFRKNWLRLTW

SEQ ID NO: 7315 - protein, 20 aa, Artificial Sequence
  Description of Artificial Sequence: Synthetic peptide
  MOD_RES (4)..(4): phosphorylated serine
RPKSQVAEVFFRKNWLRLTW

SEQ ID NO: 7316 - protein, 21 aa, Artificial Sequence
  Description of Artificial Sequence: Synthetic peptide
  MOD_RES (4)..(4): phosphorylated serine
RPKSVDFDSLFFRKNWLRLTW

SEQ ID NO: 7317 - protein, 20 aa, Artificial Sequence
  Description of Artificial Sequence: Synthetic peptide
  MOD_RES (4)..(4): phosphorylated threonine
RPKTPPVVIFFRKNWLRLTW

SEQ ID NO: 7318 - protein, 20 aa, Artificial Sequence
  Description of Artificial Sequence: Synthetic peptide
  MOD_RES (4)..(4): phosphorylated serine
RPLSLLLALFFRKNWLRLTW

SEQ ID NO: 7319 - protein, 20 aa, Artificial Sequence
  Description of Artificial Sequence: Synthetic peptide
  MOD_RES (4)..(4): phosphorylated serine
RPLSPGGAFFFRKNWLRLTW

SEQ ID NO: 7320 - protein, 20 aa, Artificial Sequence
  Description of Artificial Sequence: Synthetic peptide
  MOD_RES (4)..(4): phosphorylated serine
RPLSPGGALFFRKNWLRLTW

SEQ ID NO: 7321 - protein, 20 aa, Artificial Sequence
  Description of Artificial Sequence: Synthetic peptide
  MOD_RES (4)..(4): phosphorylated serine
RPLSPGGAMFFRKNWLRLTW

SEQ ID NO: 7322 - protein, 20 aa, Artificial Sequence
  Description of Artificial Sequence: Synthetic peptide
  MOD_RES (4)..(4): phosphorylated serine
RPLSPGGAVFFRKNWLRLTW

SEQ ID NO: 7323 - protein, 19 aa, Artificial Sequence
  Description of Artificial Sequence: Synthetic peptide
  MOD_RES (4)..(4): phosphorylated serine
RPLSPLLFFFRKNWLRLTW

SEQ ID NO: 7324 - protein, 19 aa, Artificial Sequence
  Description of Artificial Sequence: Synthetic peptide
  MOD_RES (4)..(4): phosphorylated serine
RPLSPLLLFFRKNWLRLTW

SEQ ID NO: 7325 - protein, 19 aa, Artificial Sequence
  Description of Artificial Sequence: Synthetic peptide
  MOD_RES (4)..(4): phosphorylated serine
RPLSPLLMFFRKNWLRLTW

SEQ ID NO: 7326 - protein, 19 aa, Artificial Sequence
  Description of Artificial Sequence: Synthetic peptide
  MOD_RES (4)..(4): phosphorylated serine
RPLSPLLVFFRKNWLRLTW

SEQ ID NO: 7327 - protein, 20 aa, Artificial Sequence
  Description of Artificial Sequence: Synthetic peptide
  MOD_RES (4)..(4): phosphorylated serine
RPLSVVYVLFFRKNWLRLTW

SEQ ID NO: 7328 - protein, 20 aa, Artificial Sequence
  Description of Artificial Sequence: Synthetic peptide
  MOD_RES (4)..(4): phosphorylated serine
RPMSESPHMFFRKNWLRLTW

SEQ ID NO: 7329 - protein, 21 aa, Artificial Sequence
  Description of Artificial Sequence: Synthetic peptide
  MOD_RES (4)..(4): phosphorylated serine
RPNSPSPTAFFFRKNWLRLTW

SEQ ID NO: 7330 - protein, 21 aa, Artificial Sequence
  Description of Artificial Sequence: Synthetic peptide
  MOD_RES (4)..(4): phosphorylated serine
RPNSPSPTALFFRKNWLRLTW

SEQ ID NO: 7331 - protein, 21 aa, Artificial Sequence
  Description of Artificial Sequence: Synthetic peptide
  MOD_RES (4)..(4): phosphorylated serine
RPNSPSPTAMFFRKNWLRLTW

SEQ ID NO: 7332 - protein, 21 aa, Artificial Sequence
  Description of Artificial Sequence: Synthetic peptide
  MOD_RES (4)..(4): phosphorylated serine
RPNSPSPTAVFFRKNWLRLTW

SEQ ID NO: 7333 - protein, 21 aa, Artificial Sequence
  Description of Artificial Sequence: Synthetic peptide
RPPIGTQSSLFFRKNWLRLTW

SEQ ID NO: 7334 - protein, 21 aa, Artificial Sequence
  Description of Artificial Sequence: Synthetic peptide
  MOD_RES (8)..(8): phosphorylated threonine
RPPPPPDTPFFFRKNWLRLTW

SEQ ID NO: 7335 - protein, 21 aa, Artificial Sequence
  Description of Artificial Sequence: Synthetic peptide
  MOD_RES (8)..(8): phosphorylated threonine
RPPPPPDTPLFFRKNWLRLTW

SEQ ID NO: 7336 - protein, 21 aa, Artificial Sequence
  Description of Artificial Sequence: Synthetic peptide
  MOD_RES (8)..(8): phosphorylated threonine
RPPPPPDTPMFFRKNWLRLTW

SEQ ID NO: 7337 - protein, 21 aa, Artificial Sequence
  Description of Artificial Sequence: Synthetic peptide
  MOD_RES (8)..(8): phosphorylated threonine
RPPPPPDTPPFFRKNWLRLTW

SEQ ID NO: 7338 - protein, 21 aa, Artificial Sequence
  Description of Artificial Sequence: Synthetic peptide
  MOD_RES (8)..(8): phosphorylated threonine
RPPPPPDTPVFFRKNWLRLTW

SEQ ID NO: 7339 - protein, 20 aa, Artificial Sequence
  Description of Artificial Sequence: Synthetic peptide
  MOD_RES (4)..(4): phosphorylated serine
RPPSPGPVFFFRKNWLRLTW

SEQ ID NO: 7340 - protein, 20 aa, Artificial Sequence
  Description of Artificial Sequence: Synthetic peptide
  MOD_RES (4)..(4): phosphorylated serine
RPPSPGPVLFFRKNWLRLTW

SEQ ID NO: 7341 - protein, 20 aa, Artificial Sequence
  Description of Artificial Sequence: Synthetic peptide
  MOD_RES (4)..(4): phosphorylated serine
RPPSPGPVMFFRKNWLRLTW

SEQ ID NO: 7342 - protein, 20 aa, Artificial Sequence
  Description of Artificial Sequence: Synthetic peptide
  MOD_RES (4)..(4): phosphorylated serine
RPPSPGPVVFFRKNWLRLTW

SEQ ID NO: 7343 - protein, 20 aa, Artificial Sequence
  Description of Artificial Sequence: Synthetic peptide
  MOD_RES (4)..(4): phosphorylated serine
RPPSPSSRFFFRKNWLRLTW

SEQ ID NO: 7344 - protein, 20 aa, Artificial Sequence
  Description of Artificial Sequence: Synthetic peptide
  MOD_RES (4)..(4): phosphorylated serine
RPPSPSSRLFFRKNWLRLTW

SEQ ID NO: 7345 - protein, 20 aa, Artificial Sequence
  Description of Artificial Sequence: Synthetic peptide
  MOD_RES (4)..(4): phosphorylated serine
RPPSPSSRMFFRKNWLRLTW

SEQ ID NO: 7346 - protein, 20 aa, Artificial Sequence
  Description of Artificial Sequence: Synthetic peptide
  MOD_RES (4)..(4): phosphorylated serine
RPPSPSSRVFFRKNWLRLTW

SEQ ID NO: 7347 - protein, 21 aa, Artificial Sequence
  Description of Artificial Sequence: Synthetic peptide
  MOD_RES (4)..(4): phosphorylated serine
RPPSSEFLDFFFRKNWLRLTW

SEQ ID NO: 7348 - protein, 21 aa, Artificial Sequence
  Description of Artificial Sequence: Synthetic peptide
  MOD_RES (4)..(4): phosphorylated serine
RPPSSEFLDLFFRKNWLRLTW

SEQ ID NO: 7349 - protein, 21 aa, Artificial Sequence
  Description of Artificial Sequence: Synthetic peptide
  MOD_RES (4)..(4): phosphorylated serine
RPPSSEFLDMFFRKNWLRLTW

SEQ ID NO: 7350 - protein, 21 aa, Artificial Sequence
  Description of Artificial Sequence: Synthetic peptide
  MOD_RES (4)..(4): phosphorylated serine
RPPSSEFLDVFFRKNWLRLTW

SEQ ID NO: 7351 - protein, 20 aa, Artificial Sequence
  Description of Artificial Sequence: Synthetic peptide
  MOD_RES (7)..(7): phosphorylated serine
RPQKTQSIIFFRKNWLRLTW

SEQ ID NO: 7352 - protein, 21 aa, Artificial Sequence
  Description of Artificial Sequence: Synthetic peptide
  MOD_RES (6)..(6): phosphorylated threonine
RPQRATSNVFFFRKNWLRLTW

SEQ ID NO: 7353 - protein, 21 aa, Artificial Sequence
  Description of Artificial Sequence: Synthetic peptide
  MOD_RES (7)..(7): phosphorylated serine
RPQRATSNVFFFRKNWLRLTW

SEQ ID NO: 7354 - protein, 21 aa, Artificial Sequence
  Description of Artificial Sequence: Synthetic peptide
  MOD_RES (6)..(6): phosphorylated threonine
RPQRATSNVLFFRKNWLRLTW

SEQ ID NO: 7355 - protein, 21 aa, Artificial Sequence
  Description of Artificial Sequence: Synthetic peptide
  MOD_RES (7)..(7): phosphorylated serine
RPQRATSNVLFFRKNWLRLTW

SEQ ID NO: 7356 - protein, 21 aa, Artificial Sequence
  Description of Artificial Sequence: Synthetic peptide
  MOD_RES (6)..(6): phosphorylated threonine
RPQRATSNVMFFRKNWLRLTW

SEQ ID NO: 7357 - protein, 21 aa, Artificial Sequence
  Description of Artificial Sequence: Synthetic peptide
  MOD_RES (7)..(7): phosphorylated serine
RPQRATSNVMFFRKNWLRLTW

SEQ ID NO: 7358 - protein, 21 aa, Artificial Sequence
  Description of Artificial Sequence: Synthetic peptide
  MOD_RES (6)..(6): phosphorylated threonine
RPQRATSNVVFFRKNWLRLTW

SEQ ID NO: 7359 - protein, 21 aa, Artificial Sequence
  Description of Artificial Sequence: Synthetic peptide
  MOD_RES (7)..(7): phosphorylated serine
RPQRATSNVVFFRKNWLRLTW

SEQ ID NO: 7360 - protein, 23 aa, Artificial Sequence
  Description of Artificial Sequence: Synthetic peptide
  MISC_FEATURE (4)..(7): at least one serine residue in the amino acid sequence SLSS is phosphorylated
RPRSLSSPTVTLFFRKNWLRLTW

SEQ ID NO: 7361 - protein, 23 aa, Artificial Sequence
  Description of Artificial Sequence: Synthetic peptide
  MISC_FEATURE (4)..(7): at least one serine residue in the amino acid sequence SLSS is phosphorylated
RPRSLSSPTVTVFFRKNWLRLTW

SEQ ID NO: 7362 - protein, 19 aa, Artificial Sequence
  Description of Artificial Sequence: Synthetic peptide
  MOD_RES (6)..(6): phosphorylated threonine
RPRAATVVFFRKNWLRLTW

SEQ ID NO: 7363 - protein, 20 aa, Artificial Sequence
  Description of Artificial Sequence: Synthetic peptide
  MOD_RES (6)..(6): phosphorylated threonine
RPRAATVVAFFRKNWLRLTW

SEQ ID NO: 7364 - protein, 18 aa, Artificial Sequence
  Description of Artificial Sequence: Synthetic peptide
  MOD_RES (6)..(6): phosphorylated threonine
RPRAATWFFRKNWLRLTW

SEQ ID NO: 7365 - protein, 19 aa, Artificial Sequence
  Description of Artificial Sequence: Synthetic peptide
  MOD_RES (6)..(6): phosphorylated threonine
RPRAATWAFFRKNWLRLTW

SEQ ID NO: 7366 - protein, 22 aa, Artificial Sequence
  Description of Artificial Sequence: Synthetic peptide
  MOD_RES (6)..(6): phosphorylated serine
RPRANSGGVDFFFRKNWLRLTW

SEQ ID NO: 7367 - protein, 22 aa, Artificial Sequence
  Description of Artificial Sequence: Synthetic peptide
  MOD_RES (6)..(6): phosphorylated serine
RPRANSGGVDLFFRKNWLRLTW

SEQ ID NO: 7368 - protein, 22 aa, Artificial Sequence
  Description of Artificial Sequence: Synthetic peptide
  MOD_RES (6)..(6): phosphorylated serine
RPRANSGGVDMFFRKNWLRLTW

SEQ ID NO: 7369 - protein, 22 aa, Artificial Sequence
  Description of Artificial Sequence: Synthetic peptide
  MOD_RES (6)..(6): phosphorylated serine
RPRANSGGVDVFFRKNWLRLTW

SEQ ID NO: 7370 - protein, 21 aa, Artificial Sequence
  Description of Artificial Sequence: Synthetic peptide
  MOD_RES (6)..(6): phosphorylated serine
RPRARSVDALFFRKNWLRLTW

SEQ ID NO: 7371 - protein, 21 aa, Artificial Sequence
  Description of Artificial Sequence: Synthetic peptide
  MOD_RES (5)..(5): phosphorylated threonine
RPRDTRRISLFFRKNWLRLTW

SEQ ID NO: 7372 - protein, 20 aa, Artificial Sequence
  Description of Artificial Sequence: Synthetic peptide
  MOD_RES (5)..(5): phosphorylated serine
RPRGSESLLFFRKNWLRLTW

SEQ ID NO: 7373 - protein, 20 aa, Artificial Sequence
  Description of Artificial Sequence: Synthetic peptide
  MOD_RES (5)..(5): phosphorylated serine
RPRGSQSLFFFRKNWLRLTW

SEQ ID NO: 7374 - protein, 20 aa, Artificial Sequence
  Description of Artificial Sequence: Synthetic peptide
  MOD_RES (5)..(5): phosphorylated serine
RPRGSQSLLFFRKNWLRLTW

SEQ ID NO: 7375 - protein, 20 aa, Artificial Sequence
  Description of Artificial Sequence: Synthetic peptide
  MOD_RES (5)..(5): phosphorylated serine
RPRGSQSLMFFRKNWLRLTW

SEQ ID NO: 7376 - protein, 20 aa, Artificial Sequence
  Description of Artificial Sequence: Synthetic peptide
  MOD_RES (5)..(5): phosphorylated serine
RPRGSQSLVFFRKNWLRLTW

SEQ ID NO: 7377 - protein, 21 aa, Artificial Sequence
  Description of Artificial Sequence: Synthetic peptide
  MOD_RES (6)..(6): phosphorylated serine
RPRIPSPIGFFFRKNWLRLTW

SEQ ID NO: 7378 - protein, 23 aa, Artificial Sequence
  Description of Artificial Sequence: Synthetic peptide
  MOD_RES (6)..(6): phosphorylated serine
RPRLSSTNSSRFFFRKNWLRLTW

SEQ ID NO: 7379 - protein, 21 aa, Artificial Sequence
  Description of Artificial Sequence: Synthetic peptide
  MOD_RES (6)..(6): phosphorylated serine
RPRPASSPALFFRKNWLRLTW

SEQ ID NO: 7380 - protein, 21 aa, Artificial Sequence
  Description of Artificial Sequence: Synthetic peptide
  MOD_RES (6)..(6): phosphorylated serine
RPRPHSAPSFFFRKNWLRLTW

SEQ ID NO: 7381 - protein, 21 aa, Artificial Sequence
  Description of Artificial Sequence: Synthetic peptide
  MOD_RES (6)..(6): phosphorylated serine
RPRPHSAPSLFFRKNWLRLTW

SEQ ID NO: 7382 - protein, 21 aa, Artificial Sequence
  Description of Artificial Sequence: Synthetic peptide
  MOD_RES (6)..(6): phosphorylated serine
RPRPHSAPSMFFRKNWLRLTW

SEQ ID NO: 7383 - protein, 21 aa, Artificial Sequence
  Description of Artificial Sequence: Synthetic peptide
  MOD_RES (6)..(6): phosphorylated serine
RPRPHSAPSVFFRKNWLRLTW

SEQ ID NO: 7384 - protein, 22 aa, Artificial Sequence
  Description of Artificial Sequence: Synthetic peptide
  MOD_RES (6)..(6): phosphorylated serine
RPRPSSAHVGLFFRKNWLRLTW

SEQ ID NO: 7385 - protein, 19 aa, Artificial Sequence
  Description of Artificial Sequence: Synthetic peptide
  MOD_RES (5)..(5): phosphorylated serine
RPRPSSVLFFRKNWLRLTW

SEQ ID NO: 7386 - protein, 22 aa, Artificial Sequence
  Description of Artificial Sequence: Synthetic peptide
  MOD_RES (5)..(5): phosphorylated serine
RPRPSSVLRTLFFRKNWLRLTW

SEQ ID NO: 7387 - protein, 21 aa, Artificial Sequence
  Description of Artificial Sequence: Synthetic peptide
  MOD_RES (6)..(6): phosphorylated serine
RPRPVSPSSFFFRKNWLRLTW

SEQ ID NO: 7388 - protein, 21 aa, Artificial Sequence
  Description of Artificial Sequence: Synthetic peptide
  MOD_RES (6)..(6): phosphorylated serine
RPRPVSPSSLFFRKNWLRLTW

SEQ ID NO: 7389 - protein, 22 aa, Artificial Sequence
  Description of Artificial Sequence: Synthetic peptide
  MOD_RES (6)..(6): phosphorylated serine
RPRPVSPSSLLFFRKNWLRLTW

SEQ ID NO: 7390 - protein, 21 aa, Artificial Sequence
  Description of Artificial Sequence: Synthetic peptide
  MOD_RES (6)..(6): phosphorylated serine
RPRPVSPSSMFFRKNWLRLTW

SEQ ID NO: 7391 - protein, 21 aa, Artificial Sequence
  Description of Artificial Sequence: Synthetic peptide
  MOD_RES (6)..(6): phosphorylated serine
RPRPVSPSSVFFRKNWLRLTW

SEQ ID NO: 7392 - protein, 20 aa, Artificial Sequence
  Description of Artificial Sequence: Synthetic peptide
  MOD_RES (5)..(5): phosphorylated serine
RPRRSSTQFFFRKNWLRLTW

SEQ ID NO: 7393 - protein, 20 aa, Artificial Sequence
  Description of Artificial Sequence: Synthetic peptide
  MOD_RES (5)..(5): phosphorylated serine
RPRRSSTQLFFRKNWLRLTW

SEQ ID NO: 7394 - protein, 20 aa, Artificial Sequence
  Description of Artificial Sequence: Synthetic peptide
  MOD_RES (5)..(5): phosphorylated serine
RPRRSSTQMFFRKNWLRLTW

SEQ ID NO: 7395 - protein, 20 aa, Artificial Sequence
  Description of Artificial Sequence: Synthetic peptide
  MOD_RES (5)..(5): phosphorylated serine
RPRRSSTQVFFRKNWLRLTW

SEQ ID NO: 7396 - protein, 20 aa, Artificial Sequence
  Description of Artificial Sequence: Synthetic peptide
  MOD_RES (4)..(4): phosphorylated serine
RPRSAVEQLFFRKNWLRLTW

SEQ ID NO: 7397 - protein, 19 aa, Artificial Sequence
  Description of Artificial Sequence: Synthetic peptide
  MOD_RES (4)..(4): phosphorylated serine
RPRSAVLFFFRKNWLRLTW

SEQ ID NO: 7398 - protein, 19 aa, Artificial Sequence
  Description of Artificial Sequence: Synthetic peptide
  MOD_RES (4)..(4): phosphorylated serine
RPRSAVLLFFRKNWLRLTW

SEQ ID NO: 7399 - protein, 19 aa, Artificial Sequence
  Description of Artificial Sequence: Synthetic peptide
  MOD_RES (4)..(4): phosphorylated serine
RPRSAVLMFFRKNWLRLTW

SEQ ID NO: 7400 - protein, 19 aa, Artificial Sequence
  Description of Artificial Sequence: Synthetic peptide
  MOD_RES (4)..(4): phosphorylated serine
RPRSAVLVFFRKNWLRLTW

SEQ ID NO: 7401 - protein, 22 aa, Artificial Sequence
  Description of Artificial Sequence: Synthetic peptide
  MOD_RES (6)..(6): phosphorylated serine
RPRSGSTGSSLFFRKNWLRLTW

SEQ ID NO: 7402 - protein, 21 aa, Artificial Sequence
  Description of Artificial Sequence: Synthetic peptide
  MOD_RES (4)..(4): phosphorylated serine
RPRSISVEEFFFRKNWLRLTW

SEQ ID NO: 7403 - protein, 21 aa, Artificial Sequence
  Description of Artificial Sequence: Synthetic peptide
  MOD_RES (4)..(4): phosphorylated serine
RPRSISVEELFFRKNWLRLTW

SEQ ID NO: 7404 - protein, 21 aa, Artificial Sequence
  Description of Artificial Sequence: Synthetic peptide
  MOD_RES (4)..(4): phosphorylated serine
RPRSISVEEMFFRKNWLRLTW

SEQ ID NO: 7405 - protein, 21 aa, Artificial Sequence
  Description of Artificial Sequence: Synthetic peptide
  MOD_RES (4)..(4): phosphorylated serine
RPRSISVEEVFFRKNWLRLTW

SEQ ID NO: 7406 - protein, 20 aa, Artificial Sequence
  Description of Artificial Sequence: Synthetic peptide
  MOD_RES (4)..(4): phosphorylated serine
RPRSLEVTFFFRKNWLRLTW

SEQ ID NO: 7407 - protein, 20 aa, Artificial Sequence
  Description of Artificial Sequence: Synthetic peptide
  MOD_RES (4)..(4): phosphorylated serine
RPRSLEVTIFFRKNWLRLTW

SEQ ID NO: 7408 - protein, 20 aa, Artificial Sequence
  Description of Artificial Sequence: Synthetic peptide
  MOD_RES (4)..(4): phosphorylated serine
RPRSLEVTLFFRKNWLRLTW

SEQ ID NO: 7409 - protein, 20 aa, Artificial Sequence
  Description of Artificial Sequence: Synthetic peptide
  MOD_RES (4)..(4): phosphorylated serine
RPRSLEVTMFFRKNWLRLTW

SEQ ID NO: 7410 - protein, 20 aa, Artificial Sequence
  Description of Artificial Sequence: Synthetic peptide
  MOD_RES (4)..(4): phosphorylated serine
RPRSLEVTVFFRKNWLRLTW

SEQ ID NO: 7411 - protein, 21 aa, Artificial Sequence
  Description of Artificial Sequence: Synthetic peptide
  MOD_RES (6)..(6): phosphorylated serine
RPRSLSSPTVFFRKNWLRLTW

SEQ ID NO: 7412 - protein, 23 aa, Artificial Sequence
  Description of Artificial Sequence: Synthetic peptide
  MOD_RES (6)..(6): phosphorylated serine
RPRSLSSPTVTFFFRKNWLRLTW

SEQ ID NO: 7413 - protein, 23 aa, Artificial Sequence
  Description of Artificial Sequence: Synthetic peptide
  MOD_RES (6)..(6): phosphorylated serine
RPRSLSSPTVTLFFRKNWLRLTW

SEQ ID NO: 7414 - protein, 23 aa, Artificial Sequence
  Description of Artificial Sequence: Synthetic peptide
  MOD_RES (6)..(6): phosphorylated serine
RPRSLSSPTVTMFFRKNWLRLTW

SEQ ID NO: 7415 - protein, 23 aa, Artificial Sequence
  Description of Artificial Sequence: Synthetic peptide
  MOD_RES (6)..(6): phosphorylated serine
RPRSLSSPTVTVFFRKNWLRLTW

SEQ ID NO: 7416 - protein, 20 aa, Artificial Sequence
  Description of Artificial Sequence: Synthetic peptide
  MOD_RES (4)..(4): phosphorylated serine
RPRSMTVSAFFRKNWLRLTW

SEQ ID NO: 7417 - protein, 20 aa, Artificial Sequence
  Description of Artificial Sequence: Synthetic peptide
  MOD_RES (4)..(4): phosphorylated serine
RPRSMVRSFFFRKNWLRLTW

SEQ ID NO: 7418 - protein, 20 aa, Artificial Sequence
  Description of Artificial Sequence: Synthetic peptide
  MOD_RES (4)..(4): phosphorylated serine
RPRSPAARFFFRKNWLRLTW

SEQ ID NO: 7419 - protein, 20 aa, Artificial Sequence
  Description of Artificial Sequence: Synthetic peptide
  MOD_RES (4)..(4): phosphorylated serine
RPRSPAARLFFRKNWLRLTW

SEQ ID NO: 7420 - protein, 20 aa, Artificial Sequence
  Description of Artificial Sequence: Synthetic peptide
  MOD_RES (4)..(4): phosphorylated serine
RPRSPAARMFFRKNWLRLTW

SEQ ID NO: 7421 - protein, 20 aa, Artificial Sequence
  Description of Artificial Sequence: Synthetic peptide
  MOD_RES (4)..(4): phosphorylated serine
RPRSPAARVFFRKNWLRLTW

SEQ ID NO: 7422 - protein, 22 aa, Artificial Sequence
  Description of Artificial Sequence: Synthetic peptide
  MOD_RES (4)..(4): phosphorylated serine
RPRSPGSNSKVFFRKNWLRLTW

SEQ ID NO: 7423 - protein, 21 aa, Artificial Sequence
  Description of Artificial Sequence: Synthetic peptide
  MOD_RES (4)..(4): phosphorylated serine
RPRSPNMQDLFFRKNWLRLTW

SEQ ID NO: 7424 - protein, 20 aa, Artificial Sequence
  Description of Artificial Sequence: Synthetic peptide
  MOD_RES (4)..(4): phosphorylated serine
RPRSPPGGPFFRKNWLRLTW

SEQ ID NO: 7425 - protein, 21 aa, Artificial Sequence
  Description of Artificial Sequence: Synthetic peptide
  MOD_RES (4)..(4): phosphorylated serine
RPRSPPPRAFFFRKNWLRLTW

SEQ ID NO: 7426 - protein, 21 aa, Artificial Sequence
  Description of Artificial Sequence: Synthetic peptide
  MOD_RES (4)..(4): phosphorylated serine
RPRSPPPRALFFRKNWLRLTW

SEQ ID NO: 7427 - protein, 21 aa, Artificial Sequence
  Description of Artificial Sequence: Synthetic peptide
  MOD_RES (4)..(4): phosphorylated serine
RPRSPPPRAMFFRKNWLRLTW

SEQ ID NO: 7428 - protein, 21 aa, Artificial Sequence
  Description of Artificial Sequence: Synthetic peptide
  MOD_RES (4)..(4): phosphorylated serine
RPRSPPPRAPFFRKNWLRLTW

SEQ ID NO: 7429 - protein, 21 aa, Artificial Sequence
  Description of Artificial Sequence: Synthetic peptide
  MOD_RES (4)..(4): phosphorylated serine
RPRSPPPRAVFFRKNWLRLTW

SEQ ID NO: 7430 - protein, 20 aa, Artificial Sequence
  Description of Artificial Sequence: Synthetic peptide
  MOD_RES (4)..(4): phosphorylated serine
RPRSPPSSPFFRKNWLRLTW

SEQ ID NO: 7431 - protein, 21 aa, Artificial Sequence
  Description of Artificial Sequence: Synthetic peptide
  MOD_RES (4)..(4): phosphorylated serine
RPRSPRENSFFFRKNWLRLTW

SEQ ID NO: 7432 - protein, 21 aa, Artificial Sequence
  Description of Artificial Sequence: Synthetic peptide
  MOD_RES (4)..(4): phosphorylated serine
RPRSPRENSIFFRKNWLRLTW

SEQ ID NO: 7433 - protein, 21 aa, Artificial Sequence
  Description of Artificial Sequence: Synthetic peptide
  MOD_RES (4)..(4): phosphorylated serine
RPRSPRENSLFFRKNWLRLTW

SEQ ID NO: 7434 - protein, 21 aa, Artificial Sequence
  Description of Artificial Sequence: Synthetic peptide
  MOD_RES (4)..(4): phosphorylated serine
RPRSPRENSMFFRKNWLRLTW

SEQ ID NO: 7435 - protein, 21 aa, Artificial Sequence
  Description of Artificial Sequence: Synthetic peptide
  MOD_RES (4)..(4): phosphorylated serine
RPRSPRENSVFFRKNWLRLTW

SEQ ID NO: 7436 - protein, 20 aa, Artificial Sequence
  Description of Artificial Sequence: Synthetic peptide
  MOD_RES (4)..(4): phosphorylated serine
RPRSPRPPPFFRKNWLRLTW

SEQ ID NO: 7437 - protein, 21 aa, Artificial Sequence
  Description of Artificial Sequence: Synthetic peptide
  MOD_RES (4)..(4): phosphorylated serine
RPRSPRQNLIFFRKNWLRLTW

SEQ ID NO: 7438 - protein, 21 aa, Artificial Sequence
  Description of Artificial Sequence: Synthetic peptide
  MOD_RES (4)..(4): phosphorylated serine
RPRSPRQNSFFFRKNWLRLTW

SEQ ID NO: 7439 - protein, 21 aa, Artificial Sequence
  Description of Artificial Sequence: Synthetic peptide
  MOD_RES (4)..(4): phosphorylated serine
RPRSPRQNSIFFRKNWLRLTW

SEQ ID NO: 7440 - protein, 21 aa, Artificial Sequence
  Description of Artificial Sequence: Synthetic peptide
  MOD_RES (4)..(4): phosphorylated serine
RPRSPRQNSMFFRKNWLRLTW

SEQ ID NO: 7441 - protein, 21 aa, Artificial Sequence
  Description of Artificial Sequence: Synthetic peptide
  MOD_RES (4)..(4): phosphorylated serine
RPRSPRQNSVFFRKNWLRLTW

SEQ ID NO: 7442 - protein, 20 aa, Artificial Sequence
  Description of Artificial Sequence: Synthetic peptide
  MOD_RES (4)..(4): phosphorylated serine
RPRSPSPIFFFRKNWLRLTW

SEQ ID NO: 7443 - protein, 20 aa, Artificial Sequence
  Description of Artificial Sequence: Synthetic peptide
  MOD_RES (4)..(4): phosphorylated serine
RPRSPSPILFFRKNWLRLTW

SEQ ID NO: 7444 - protein, 20 aa, Artificial Sequence
  Description of Artificial Sequence: Synthetic peptide
  MOD_RES (4)..(4): phosphorylated serine
RPRSPSPIMFFRKNWLRLTW

SEQ ID NO: 7445 - protein, 20 aa, Artificial Sequence
  Description of Artificial Sequence: Synthetic peptide
  MOD_RES (4)..(4): phosphorylated serine
RPRSPSPISFFRKNWLRLTW

SEQ ID NO: 7446 - protein, 20 aa, Artificial Sequence
  Description of Artificial Sequence: Synthetic peptide
  MOD_RES (6)..(6): phosphorylated serine
RPRSPSPISFFRKNWLRLTW

SEQ ID NO: 7447 - protein, 20 aa, Artificial Sequence
  Description of Artificial Sequence: Synthetic peptide
  MOD_RES (4)..(4): phosphorylated serine
RPRSPSPIVFFRKNWLRLTW

SEQ ID NO: 7448 - protein, 19 aa, Artificial Sequence
  Description of Artificial Sequence: Synthetic peptide
  MOD_RES (4)..(4): phosphorylated serine
RPRSPTGFFFRKNWLRLTW

SEQ ID NO: 7449 - protein, 19 aa, Artificial Sequence
  Description of Artificial Sequence: Synthetic peptide
  MOD_RES (4)..(4): phosphorylated serine
RPRSPTGLFFRKNWLRLTW

SEQ ID NO: 7450 - protein, 19 aa, Artificial Sequence
  Description of Artificial Sequence: Synthetic peptide
  MOD_RES (4)..(4): phosphorylated serine
RPRSPTGMFFRKNWLRLTW

SEQ ID NO: 7451 - protein, 19 aa, Artificial Sequence
  Description of Artificial Sequence: Synthetic peptide
  MOD_RES (4)..(4): phosphorylated serine
RPRSPTGPFFRKNWLRLTW

SEQ ID NO: 7452 - protein, 23 aa, Artificial Sequence
  Description of Artificial Sequence: Synthetic peptide
  MOD_RES (4)..(4): phosphorylated serine
  MOD_RES (9)..(9): phosphorylated serine
RPRSPTGPSNSFFFRKNWLRLTW

SEQ ID NO: 7453 - protein, 23 aa, Artificial Sequence
  Description of Artificial Sequence: Synthetic peptide
  MOD_RES (4)..(4): phosphorylated serine
RPRSPTGPSNSFFFRKNWLRLTW

SEQ ID NO: 7454 - protein, 24 aa, Artificial Sequence
  Description of Artificial Sequence: Synthetic peptide
  MOD_RES (4)..(4): phosphorylated serine
RPRSPTGPSNSFLFFRKNWLRLTW

SEQ ID NO: 7455 - protein, 23 aa, Artificial Sequence
  Description of Artificial Sequence: Synthetic peptide
  MOD_RES (4)..(4): phosphorylated serine
  MOD_RES (9)..(9): phosphorylated serine
RPRSPTGPSNSLFFRKNWLRLTW

SEQ ID NO: 7456 - protein, 23 aa, Artificial Sequence
  Description of Artificial Sequence: Synthetic peptide
  MOD_RES (4)..(4): phosphorylated serine
  MOD_RES (9)..(9): phosphorylated serine
RPRSPTGPSNSMFFRKNWLRLTW

SEQ ID NO: 7457 - protein, 23 aa, Artificial Sequence
  Description of Artificial Sequence: Synthetic peptide
  MOD_RES (4)..(4): phosphorylated serine
  MOD_RES (9)..(9): phosphorylated serine
RPRSPTGPSNSVFFRKNWLRLTW

SEQ ID NO: 7458 - protein, 19 aa, Artificial Sequence
  Description of Artificial Sequence: Synthetic peptide
  MOD_RES (4)..(4): phosphorylated serine
RPRSPTGVFFRKNWLRLTW

SEQ ID NO: 7459 - protein, 20 aa, Artificial Sequence
  Description of Artificial Sequence: Synthetic peptide
  MOD_RES (4)..(4): phosphorylated serine
RPRSPTRSFFFRKNWLRLTW

SEQ ID NO: 7460 - protein, 20 aa, Artificial Sequence
  Description of Artificial Sequence: Synthetic peptide
  MOD_RES (4)..(4): phosphorylated serine
RPRSPTRSLFFRKNWLRLTW

SEQ ID NO: 7461 - protein, 20 aa, Artificial Sequence
  Description of Artificial Sequence: Synthetic peptide
  MOD_RES (4)..(4): phosphorylated serine
RPRSPTRSMFFRKNWLRLTW

SEQ ID NO: 7462 - protein, 20 aa, Artificial Sequence
  Description of Artificial Sequence: Synthetic peptide
  MOD_RES (4)..(4): phosphorylated serine
RPRSPTRSVFFRKNWLRLTW

SEQ ID NO: 7463 - protein, 20 aa, Artificial Sequence
  Description of Artificial Sequence: Synthetic peptide
  MOD_RES (4)..(4): phosphorylated serine
RPRSPWGKLFFRKNWLRLTW

SEQ ID NO: 7464 - protein, 21 aa, Artificial Sequence
  Description of Artificial Sequence: Synthetic peptide
  MOD_RES (4)..(4): phosphorylated serine
RPRSQYNTKLFFRKNWLRLTW

SEQ ID NO: 7465 - protein, 23 aa, Artificial Sequence
  Description of Artificial Sequence: Synthetic peptide
  MOD_RES (6)..(6): phosphorylated serine
RPRSTSQSIVSLFFRKNWLRLTW

SEQ ID NO: 7466 - protein, 20 aa, Artificial Sequence
  Description of Artificial Sequence: Synthetic peptide
  MOD_RES (4)..(4): phosphorylated threonine
RPRTPLRSLFFRKNWLRLTW

SEQ ID NO: 7467 - protein, 20 aa, Artificial Sequence
  Description of Artificial Sequence: Synthetic peptide
  MOD_RES (8)..(8): phosphorylated serine
RPSGRRESFFFRKNWLRLTW

SEQ ID NO: 7468 - protein, 20 aa, Artificial Sequence
  Description of Artificial Sequence: Synthetic peptide
  MOD_RES (8)..(8): phosphorylated serine
RPSGRRESLFFRKNWLRLTW

SEQ ID NO: 7469 - protein, 20 aa, Artificial Sequence
  Description of Artificial Sequence: Synthetic peptide
  MOD_RES (8)..(8): phosphorylated serine
RPSGRRESMFFRKNWLRLTW

SEQ ID NO: 7470 - protein, 20 aa, Artificial Sequence
  Description of Artificial Sequence: Synthetic peptide
  MOD_RES (8)..(8): phosphorylated serine
RPSGRRESVFFRKNWLRLTW

SEQ ID NO: 7471 - protein, 18 aa, Artificial Sequence
  Description of Artificial Sequence: Synthetic peptide
  MOD_RES (3)..(3): phosphorylated serine
RPSNPQLFFRKNWLRLTW

SEQ ID NO: 7472 - protein, 20 aa, Artificial Sequence
  Description of Artificial Sequence: Synthetic peptide
  MOD_RES (6)..(6): phosphorylated serine
RPSRSSPGFFFRKNWLRLTW

SEQ ID NO: 7473 - protein, 20 aa, Artificial Sequence
  Description of Artificial Sequence: Synthetic peptide
  MOD_RES (6)..(6): phosphorylated serine
RPSRSSPGLFFRKNWLRLTW

SEQ ID NO: 7474 - protein, 20 aa, Artificial Sequence
  Description of Artificial Sequence: Synthetic peptide
  MOD_RES (6)..(6): phosphorylated serine
RPSRSSPGMFFRKNWLRLTW

SEQ ID NO: 7475 - protein, 20 aa, Artificial Sequence
  Description of Artificial Sequence: Synthetic peptide
  MOD_RES (6)..(6): phosphorylated serine
RPSRSSPGVFFRKNWLRLTW

SEQ ID NO: 7476 - protein, 20 aa, Artificial Sequence
  Description of Artificial Sequence: Synthetic peptide
  MOD_RES (4)..(4): phosphorylated serine
RPSSGFYELFFRKNWLRLTW

SEQ ID NO: 7477 - protein, 23 aa, Artificial Sequence
  Description of Artificial Sequence: Synthetic peptide
  MOD_RES (4)..(4): phosphorylated serine
RPSSLDAEIDSFFFRKNWLRLTW

SEQ ID NO: 7478 - protein, 23 aa, Artificial Sequence
  Description of Artificial Sequence: Synthetic peptide
  MOD_RES (4)..(4): phosphorylated serine
RPSSLDAEIDSLFFRKNWLRLTW

SEQ ID NO: 7479 - protein, 23 aa, Artificial Sequence
  Description of Artificial Sequence: Synthetic peptide
  MOD_RES (4)..(4): phosphorylated serine
RPSSLDAEIDSMFFRKNWLRLTW

SEQ ID NO: 7480 - protein, 23 aa, Artificial Sequence
  Description of Artificial Sequence: Synthetic peptide
  MOD_RES (4)..(4): phosphorylated serine
RPSSLDAEIDSVFFRKNWLRLTW

SEQ ID NO: 7481 - protein, 19 aa, Artificial Sequence
  Description of Artificial Sequence: Synthetic peptide
  MOD_RES (4)..(4): phosphorylated serine
RPSSLPDFFFRKNWLRLTW

SEQ ID NO: 7482 - protein, 19 aa, Artificial Sequence
  Description of Artificial Sequence: Synthetic peptide
  MOD_RES (4)..(4): phosphorylated serine
RPSSLPDLFFRKNWLRLTW

SEQ ID NO: 7483 - protein, 19 aa, Artificial Sequence
  Description of Artificial Sequence: Synthetic peptide
  MOD_RES (4)..(4): phosphorylated serine
RPSSLPDMFFRKNWLRLTW

SEQ ID NO: 7484 - protein, 19 aa, Artificial Sequence
  Description of Artificial Sequence: Synthetic peptide
  MOD_RES (4)..(4): phosphorylated serine
RPSSLPDVFFRKNWLRLTW

SEQ ID NO: 7485 - protein, 20 aa, Artificial Sequence
  Description of Artificial Sequence: Synthetic peptide
  MOD_RES (3)..(3): phosphorylated serine
RPSSPALYFFFRKNWLRLTW

SEQ ID NO: 7486 - protein, 20 aa, Artificial Sequence
  Description of Artificial Sequence: Synthetic peptide
  MOD_RES (4)..(4): phosphorylated serine
RPSSPALYFFFRKNWLRLTW

SEQ ID NO: 7487 - protein, 20 aa, Artificial Sequence
  Description of Artificial Sequence: Synthetic peptide
  MOD_RES (3)..(3): phosphorylated serine
RPSSPALYLFFRKNWLRLTW

SEQ ID NO: 7488 - protein, 20 aa, Artificial Sequence
  Description of Artificial Sequence: Synthetic peptide
  MOD_RES (3)..(3): phosphorylated serine
RPSSPALYMFFRKNWLRLTW

SEQ ID NO: 7489 - protein, 20 aa, Artificial Sequence
  Description of Artificial Sequence: Synthetic peptide
  MOD_RES (3)..(3): phosphorylated serine
RPSSPALYVFFRKNWLRLTW

SEQ ID NO: 7490 - protein, 22 aa, Artificial Sequence
  Description of Artificial Sequence: Synthetic peptide
  MOD_RES (4)..(4): phosphorylated threonine
RPSTPKSDSEFFFRKNWLRLTW

SEQ ID NO: 7491 - protein, 22 aa, Artificial Sequence
  Description of Artificial Sequence: Synthetic peptide
  MOD_RES (4)..(4): phosphorylated threonine
RPSTPKSDSELFFRKNWLRLTW

SEQ ID NO: 7492 - protein, 22 aa, Artificial Sequence
  Description of Artificial Sequence: Synthetic peptide
  MOD_RES (4)..(4): phosphorylated threonine
RPSTPKSDSEMFFRKNWLRLTW

SEQ ID NO: 7493 - protein, 22 aa, Artificial Sequence
  Description of Artificial Sequence: Synthetic peptide
  MOD_RES (4)..(4): phosphorylated threonine
RPSTPKSDSEVFFRKNWLRLTW

SEQ ID NO: 7494 - protein, 21 aa, Artificial Sequence
  Description of Artificial Sequence: Synthetic peptide
  MOD_RES (9)..(9): phosphorylated serine
RPTKIGRRSLFFRKNWLRLTW

SEQ ID NO: 7495 - protein, 20 aa, Artificial Sequence
  Description of Artificial Sequence: Synthetic peptide
  MOD_RES (4)..(4): phosphorylated serine
RPTSFADELFFRKNWLRLTW

SEQ ID NO: 7496 - protein, 20 aa, Artificial Sequence
  Description of Artificial Sequence: Synthetic peptide
  MOD_RES (4)..(4): phosphorylated serine
RPTSPIQIMFFRKNWLRLTW

SEQ ID NO: 7497 - protein, 20 aa, Artificial Sequence
  Description of Artificial Sequence: Synthetic peptide
  MOD_RES (4)..(4): phosphorylated serine
RPTSRLNRFFFRKNWLRLTW

SEQ ID NO: 7498 - protein, 20 aa, Artificial Sequence
  Description of Artificial Sequence: Synthetic peptide
  MOD_RES (4)..(4): phosphorylated serine
RPTSRLNRLFFRKNWLRLTW

SEQ ID NO: 7499 - protein, 20 aa, Artificial Sequence
  Description of Artificial Sequence: Synthetic peptide
  MOD_RES (4)..(4): phosphorylated serine
RPTSRLNRMFFRKNWLRLTW

SEQ ID NO: 7500 - protein, 20 aa, Artificial Sequence
  Description of Artificial Sequence: Synthetic peptide
  MOD_RES (4)..(4): phosphorylated serine
RPTSRLNRVFFRKNWLRLTW

SEQ ID NO: 7501 - protein, 20 aa, Artificial Sequence
  Description of Artificial Sequence: Synthetic peptide
  MOD_RES (4)..(4): phosphorylated serine
RPVSPFQEFFFRKNWLRLTW

SEQ ID NO: 7502 - protein, 20 aa, Artificial Sequence
  Description of Artificial Sequence: Synthetic peptide
  MOD_RES (4)..(4): phosphorylated serine
RPVSPFQELFFRKNWLRLTW

SEQ ID NO: 7503 - protein, 20 aa, Artificial Sequence
  Description of Artificial Sequence: Synthetic peptide
  MOD_RES (4)..(4): phosphorylated serine
RPVSPFQEMFFRKNWLRLTW

SEQ ID NO: 7504 - protein, 20 aa, Artificial Sequence
  Description of Artificial Sequence: Synthetic peptide
  MOD_RES (4)..(4): phosphorylated serine
RPVSPFQEVFFRKNWLRLTW

SEQ ID NO: 7505 - protein, 20 aa, Artificial Sequence
  Description of Artificial Sequence: Synthetic peptide
  MOD_RES (4)..(4): phosphorylated serine
RPVSPGKDFFFRKNWLRLTW

SEQ ID NO: 7506 - protein, 20 aa, Artificial Sequence
  Description of Artificial Sequence: Synthetic peptide
  MOD_RES (4)..(4): phosphorylated serine
RPVSPGKDIFFRKNWLRLTW

SEQ ID NO: 7507 - protein, 20 aa, Artificial Sequence
  Description of Artificial Sequence: Synthetic peptide
  MOD_RES (4)..(4): phosphorylated serine
RPVSPGKDLFFRKNWLRLTW

SEQ ID NO: 7508 - protein, 20 aa, Artificial Sequence
  Description of Artificial Sequence: Synthetic peptide
  MOD_RES (4)..(4): phosphorylated serine
RPVSPGKDMFFRKNWLRLTW

SEQ ID NO: 7509 - protein, 20 aa, Artificial Sequence
  Description of Artificial Sequence: Synthetic peptide
  MOD_RES (4)..(4): phosphorylated serine
RPVSPGKDVFFRKNWLRLTW

SEQ ID NO: 7510 - protein, 20 aa, Artificial Sequence
  Description of Artificial Sequence: Synthetic peptide
  MOD_RES (6)..(6): phosphorylated serine
RPVSPSSLLFFRKNWLRLTW

SEQ ID NO: 7511 - protein, 21 aa, Artificial Sequence
  Description of Artificial Sequence: Synthetic peptide
  MOD_RES (4)..(4): phosphorylated serine
RPVSTDFAQYFFRKNWLRLTW

SEQ ID NO: 7512 - protein, 20 aa, Artificial Sequence
  Description of Artificial Sequence: Synthetic peptide
  MOD_RES (4)..(4): phosphorylated threonine
RPVTPVSDFFFRKNWLRLTW

SEQ ID NO: 7513 - protein, 20 aa, Artificial Sequence
  Description of Artificial Sequence: Synthetic peptide
  MOD_RES (4)..(4): phosphorylated threonine
RPVTPVSDLFFRKNWLRLTW

SEQ ID NO: 7514 - protein, 20 aa, Artificial Sequence
  Description of Artificial Sequence: Synthetic peptide
  MOD_RES (4)..(4): phosphorylated threonine
RPVTPVSDMFFRKNWLRLTW

SEQ ID NO: 7515 - protein, 20 aa, Artificial Sequence
  Description of Artificial Sequence: Synthetic peptide
  MOD_RES (4)..(4): phosphorylated threonine
RPVTPVSDVFFRKNWLRLTW

SEQ ID NO: 7516 - protein, 20 aa, Artificial Sequence
  Description of Artificial Sequence: Synthetic peptide
  MOD_RES (4)..(4): phosphorylated serine
RPWSNSRGLFFRKNWLRLTW

SEQ ID NO: 7517 - protein, 20 aa, Artificial Sequence
  Description of Artificial Sequence: Synthetic peptide
  MOD_RES (4)..(4): phosphorylated serine
RPWSPAVSAFFRKNWLRLTW

SEQ ID NO: 7518 - protein, 20 aa, Artificial Sequence
  Description of Artificial Sequence: Synthetic peptide
  MOD_RES (4)..(4): phosphorylated serine
RPWSPAVSFFFRKNWLRLTW

SEQ ID NO: 7519 - protein, 20 aa, Artificial Sequence
  Description of Artificial Sequence: Synthetic peptide
  MOD_RES (4)..(4): phosphorylated serine
RPWSPAVSLFFRKNWLRLTW

SEQ ID NO: 7520 - protein, 20 aa, Artificial Sequence
  Description of Artificial Sequence: Synthetic peptide
  MOD_RES (4)..(4): phosphorylated serine
RPWSPAVSMFFRKNWLRLTW

SEQ ID NO: 7521 - protein, 20 aa, Artificial Sequence
  Description of Artificial Sequence: Synthetic peptide
  MOD_RES (4)..(4): phosphorylated serine
RPWSPAVSVFFRKNWLRLTW

SEQ ID NO: 7522 - protein, 21 aa, Artificial Sequence
  Description of Artificial Sequence: Synthetic peptide
  MOD_RES (4)..(4): phosphorylated serine
RPYSPPFFSFFFRKNWLRLTW

SEQ ID NO: 7523 - protein, 21 aa, Artificial Sequence
  Description of Artificial Sequence: Synthetic peptide
  MOD_RES (4)..(4): phosphorylated serine
RPYSPPFFSLFFRKNWLRLTW

SEQ ID NO: 7524 - protein, 21 aa, Artificial Sequence
  Description of Artificial Sequence: Synthetic peptide
  MOD_RES (4)..(4): phosphorylated serine
RPYSPPFFSMFFRKNWLRLTW

SEQ ID NO: 7525 - protein, 21 aa, Artificial Sequence
  Description of Artificial Sequence: Synthetic peptide
  MOD_RES (4)..(4): phosphorylated serine
RPYSPPFFSVFFRKNWLRLTW

SEQ ID NO: 7526 - protein, 20 aa, Artificial Sequence
  Description of Artificial Sequence: Synthetic peptide
  MOD_RES (6)..(6): phosphorylated serine
RPYSPSQALFFRKNWLRLTW

SEQ ID NO: 7527 - protein, 21 aa, Artificial Sequence
  Description of Artificial Sequence: Synthetic peptide
  MOD_RES (4)..(4): phosphorylated serine
RPYSPSQYALFFRKNWLRLTW

SEQ ID NO: 7528 - protein, 21 aa, Artificial Sequence
  Description of Artificial Sequence: Synthetic peptide
  MOD_RES (6)..(6): phosphorylated serine
RPYSPSQYALFFRKNWLRLTW

SEQ ID NO: 7529 - protein, 20 aa, Artificial Sequence
  Description of Artificial Sequence: Synthetic peptide
  MOD_RES (4)..(4): phosphorylated serine
RPYSQVNVLFFRKNWLRLTW

SEQ ID NO: 7530 - protein, 21 aa, Artificial Sequence
  Description of Artificial Sequence: Synthetic peptide
  MOD_RES (4)..(4): phosphorylated serine
RQASIELPSMFFRKNWLRLTW

SEQ ID NO: 7531 - protein, 23 aa, Artificial Sequence
  Description of Artificial Sequence: Synthetic peptide
  MOD_RES (4)..(4): phosphorylated serine
RQASIELPSMAVFFRKNWLRLTW

SEQ ID NO: 7532 - protein, 21 aa, Artificial Sequence
  Description of Artificial Sequence: Synthetic peptide
  MOD_RES (4)..(4): phosphorylated serine
RQASIELPSVFFRKNWLRLTW

SEQ ID NO: 7533 - protein, 20 aa, Artificial Sequence
  Description of Artificial Sequence: Synthetic peptide
  MOD_RES (4)..(4): phosphorylated serine
RQASLSISVFFRKNWLRLTW

SEQ ID NO: 7534 - protein, 20 aa, Artificial Sequence
  Description of Artificial Sequence: Synthetic peptide
  MOD_RES (4)..(4): phosphorylated serine
RQASPLVHKFFRKNWLRLTW

SEQ ID NO: 7535 - protein, 20 aa, Artificial Sequence
  Description of Artificial Sequence: Synthetic peptide
  MOD_RES (4)..(4): phosphorylated serine
RQASPLVHRFFRKNWLRLTW

SEQ ID NO: 7536 - protein, 20 aa, Artificial Sequence
  Description of Artificial Sequence: Synthetic peptide
  MOD_RES (4)..(4): phosphorylated serine
RQASPLVHYFFRKNWLRLTW

SEQ ID NO: 7537 - protein, 22 aa, Artificial Sequence
  Description of Artificial Sequence: Synthetic peptide
  MOD_RES (4)..(4): phosphorylated serine
RQDSTPGKVFLFFRKNWLRLTW

SEQ ID NO: 7538 - protein, 22 aa, Artificial Sequence
  Description of Artificial Sequence: Synthetic peptide
  MOD_RES (5)..(5): phosphorylated threonine
RQDSTPGKVFLFFRKNWLRLTW

SEQ ID NO: 7539 - protein, 22 aa, Artificial Sequence
  Description of Artificial Sequence: Synthetic peptide
  MOD_RES (4)..(4): phosphorylated serine
RQDSTPGKVFVFFRKNWLRLTW

SEQ ID NO: 7540 - protein, 20 aa, Artificial Sequence
  Description of Artificial Sequence: Synthetic peptide
  MOD_RES (4)..(4): phosphorylated serine
RQISFKAEVFFRKNWLRLTW

SEQ ID NO: 7541 - protein, 20 aa, Artificial Sequence
  Description of Artificial Sequence: Synthetic peptide
  MOD_RES (4)..(4): phosphorylated serine
RQISQDVKLFFRKNWLRLTW

SEQ ID NO: 7542 - protein, 20 aa, Artificial Sequence
  Description of Artificial Sequence: Synthetic peptide
  MOD_RES (4)..(4): phosphorylated serine
RQISQDVKVFFRKNWLRLTW

SEQ ID NO: 7543 - protein, 20 aa, Artificial Sequence
  Description of Artificial Sequence: Synthetic peptide
  MOD_RES (4)..(4): phosphorylated serine
RQKSPLFQFFFRKNWLRLTW

SEQ ID NO: 7544 - protein, 20 aa, Artificial Sequence
  Description of Artificial Sequence: Synthetic peptide
  MOD_RES (4)..(4): phosphorylated serine
RQLSALHRAFFRKNWLRLTW

SEQ ID NO: 7545 - protein, 23 aa, Artificial Sequence
  Description of Artificial Sequence: Synthetic peptide
  MOD_RES (4)..(4): phosphorylated serine
RQLSLEGSGLGVFFRKNWLRLTW

SEQ ID NO: 7546 - protein, 21 aa, Artificial Sequence
  Description of Artificial Sequence: Synthetic peptide
  MOD_RES (4)..(4): phosphorylated serine
RQLSSGVSEIFFRKNWLRLTW

SEQ ID NO: 7547 - protein, 21 aa, Artificial Sequence
  Description of Artificial Sequence: Synthetic peptide
  MOD_RES (4)..(4): phosphorylated serine
RQLSSGVSEVFFRKNWLRLTW

SEQ ID NO: 7548 - protein, 20 aa, Artificial Sequence
  Description of Artificial Sequence: Synthetic peptide
  MOD_RES (4)..(4): phosphorylated serine
RQSSSRFNLFFRKNWLRLTW

SEQ ID NO: 7549 - protein, 20 aa, Artificial Sequence
  Description of Artificial Sequence: Synthetic peptide
  MOD_RES (4)..(4): phosphorylated serine
RRASFAKSFFFRKNWLRLTW

SEQ ID NO: 7550 - protein, 20 aa, Artificial Sequence
  Description of Artificial Sequence: Synthetic peptide
  MOD_RES (4)..(4): phosphorylated serine
RRASFAKSKFFRKNWLRLTW

SEQ ID NO: 7551 - protein, 20 aa, Artificial Sequence
  Description of Artificial Sequence: Synthetic peptide
  MOD_RES (4)..(4): phosphorylated serine
RRASFAKSLFFRKNWLRLTW

SEQ ID NO: 7552 - protein, 20 aa, Artificial Sequence
  Description of Artificial Sequence: Synthetic peptide
  MOD_RES (4)..(4): phosphorylated serine
RRASFAKSMFFRKNWLRLTW

SEQ ID NO: 7553 - protein, 20 aa, Artificial Sequence
  Description of Artificial Sequence: Synthetic peptide
  MOD_RES (4)..(4): phosphorylated serine
RRASFAKSRFFRKNWLRLTW

SEQ ID NO: 7554 - protein, 20 aa, Artificial Sequence
  Description of Artificial Sequence: Synthetic peptide
  MOD_RES (4)..(4): phosphorylated serine
RRASIITKYFFRKNWLRLTW

SEQ ID NO: 7555 - protein, 21 aa, Artificial Sequence
  Description of Artificial Sequence: Synthetic peptide
  MOD_RES (4)..(4): phosphorylated serine
RRASLSEIGFFFRKNWLRLTW

SEQ ID NO: 7556 - protein, 21 aa, Artificial Sequence
  Description of Artificial Sequence: Synthetic peptide
  MOD_RES (4)..(4): phosphorylated serine
RRASLSEIGKFFRKNWLRLTW

SEQ ID NO: 7557 - protein, 21 aa, Artificial Sequence
  Description of Artificial Sequence: Synthetic peptide
  MOD_RES (4)..(4): phosphorylated serine
RRASLSEIGYFFRKNWLRLTW

SEQ ID NO: 7558 - protein, 20 aa, Artificial Sequence
  Description of Artificial Sequence: Synthetic peptide
  MOD_RES (4)..(4): phosphorylated serine
RRASQEANLFFRKNWLRLTW

SEQ ID NO: 7559 - protein, 20 aa, Artificial Sequence
  Description of Artificial Sequence: Synthetic peptide
  MOD_RES (5)..(5): phosphorylated serine
RRASSPFRFFFRKNWLRLTW

SEQ ID NO: 7560 - protein, 20 aa, Artificial Sequence
  Description of Artificial Sequence: Synthetic peptide
  MOD_RES (5)..(5): phosphorylated serine
RRASSPFRKFFRKNWLRLTW

SEQ ID NO: 7561 - protein, 20 aa, Artificial Sequence
  Description of Artificial Sequence: Synthetic peptide
  MOD_RES (5)..(5): phosphorylated serine
RRASSPFRLFFRKNWLRLTW

SEQ ID NO: 7562 - protein, 20 aa, Artificial Sequence
  Description of Artificial Sequence: Synthetic peptide
  MOD_RES (5)..(5): phosphorylated serine
RRASSPFRMFFRKNWLRLTW

SEQ ID NO: 7563 - protein, 20 aa, Artificial Sequence
  Description of Artificial Sequence: Synthetic peptide
  MOD_RES (5)..(5): phosphorylated serine
RRASSPFRRFFRKNWLRLTW

SEQ ID NO: 7564 - protein, 20 aa, Artificial Sequence
  Description of Artificial Sequence: Synthetic peptide
  MOD_RES (4)..(4): phosphorylated serine
RRASVFVKFFFRKNWLRLTW

SEQ ID NO: 7565 - protein, 20 aa, Artificial Sequence
  Description of Artificial Sequence: Synthetic peptide
  MOD_RES (4)..(4): phosphorylated serine
RRASVFVKKFFRKNWLRLTW

SEQ ID NO: 7566 - protein, 20 aa, Artificial Sequence
  Description of Artificial Sequence: Synthetic peptide
  MOD_RES (4)..(4): phosphorylated serine
RRASVFVKLFFRKNWLRLTW

SEQ ID NO: 7567 - protein, 20 aa, Artificial Sequence
  Description of Artificial Sequence: Synthetic peptide
  MOD_RES (4)..(4): phosphorylated serine
RRASVFVKMFFRKNWLRLTW

SEQ ID NO: 7568 - protein, 20 aa, Artificial Sequence
  Description of Artificial Sequence: Synthetic peptide
  MOD_RES (4)..(4): phosphorylated serine
RRASVFVKRFFRKNWLRLTW

SEQ ID NO: 7569 - protein, 20 aa, Artificial Sequence
  Description of Artificial Sequence: Synthetic peptide
  MOD_RES (4)..(4): phosphorylated serine
RRDSIVAEFFFRKNWLRLTW

SEQ ID NO: 7570 - protein, 20 aa, Artificial Sequence
  Description of Artificial Sequence: Synthetic peptide
  MOD_RES (4)..(4): phosphorylated serine
RRDSIVAEKFFRKNWLRLTW

SEQ ID NO: 7571 - protein, 20 aa, Artificial Sequence
  Description of Artificial Sequence: Synthetic peptide
  MOD_RES (4)..(4): phosphorylated serine
RRDSIVAELFFRKNWLRLTW

SEQ ID NO: 7572 - protein, 20 aa, Artificial Sequence
  Description of Artificial Sequence: Synthetic peptide
  MOD_RES (4)..(4): phosphorylated serine
RRDSIVAERFFRKNWLRLTW

SEQ ID NO: 7573 - protein, 20 aa, Artificial Sequence
  Description of Artificial Sequence: Synthetic peptide
  MOD_RES (4)..(4): phosphorylated serine
RRDSIVAEYFFRKNWLRLTW

SEQ ID NO: 7574 - protein, 21 aa, Artificial Sequence
  Description of Artificial Sequence: Synthetic peptide
  MOD_RES (4)..(4): phosphorylated serine
RRDSLQKPGLFFRKNWLRLTW

SEQ ID NO: 7575 - protein, 20 aa, Artificial Sequence
  Description of Artificial Sequence: Synthetic peptide
  MOD_RES (4)..(4): phosphorylated serine
RRFSFEVTLFFRKNWLRLTW

SEQ ID NO: 7576 - protein, 18 aa, Artificial Sequence
  Description of Artificial Sequence: Synthetic peptide
  MOD_RES (4)..(4): phosphorylated serine
RRFSFKFFFRKNWLRLTW

SEQ ID NO: 7577 - protein, 18 aa, Artificial Sequence
  Description of Artificial Sequence: Synthetic peptide
  MOD_RES (4)..(4): phosphorylated serine
RRFSFKKFFRKNWLRLTW

SEQ ID NO: 7578 - protein, 20 aa, Artificial Sequence
  Description of Artificial Sequence: Synthetic peptide
  MOD_RES (4)..(4): phosphorylated serine
RRFSFKKSFFFRKNWLRLTW

SEQ ID NO: 7579 - protein, 20 aa, Artificial Sequence
  Description of Artificial Sequence: Synthetic peptide
  MOD_RES (4)..(4): phosphorylated serine
RRFSFKKSKFFRKNWLRLTW

SEQ ID NO: 7580 - protein, 20 aa, Artificial Sequence
  Description of Artificial Sequence: Synthetic peptide
  MOD_RES (4)..(4): phosphorylated serine
RRFSFKKSLFFRKNWLRLTW

SEQ ID NO: 7581 - protein, 20 aa, Artificial Sequence
  Description of Artificial Sequence: Synthetic peptide
  MOD_RES (4)..(4): phosphorylated serine
RRFSFKKSMFFRKNWLRLTW

SEQ ID NO: 7582 - protein, 20 aa, Artificial Sequence
  Description of Artificial Sequence: Synthetic peptide
  MOD_RES (4)..(4): phosphorylated serine
RRFSFKKSRFFRKNWLRLTW

SEQ ID NO: 7583 - protein, 18 aa, Artificial Sequence
  Description of Artificial Sequence: Synthetic peptide
  MOD_RES (4)..(4): phosphorylated serine
RRFSFKLFFRKNWLRLTW

SEQ ID NO: 7584 - protein, 18 aa, Artificial Sequence
  Description of Artificial Sequence: Synthetic peptide
  MOD_RES (4)..(4): phosphorylated serine
RRFSFKMFFRKNWLRLTW

SEQ ID NO: 7585 - protein, 18 aa, Artificial Sequence
  Description of Artificial Sequence: Synthetic peptide
  MOD_RES (4)..(4): phosphorylated serine
RRFSFKRFFRKNWLRLTW

SEQ ID NO: 7586 - protein, 20 aa, Artificial Sequence
  Description of Artificial Sequence: Synthetic peptide
  MOD_RES (4)..(4): phosphorylated serine
RRFSGTAVYFFRKNWLRLTW

SEQ ID NO: 7587 - protein, 20 aa, Artificial Sequence
  Description of Artificial Sequence: Synthetic peptide
  MOD_RES (4)..(4): phosphorylated serine
RRFSGTVRFFFRKNWLRLTW

SEQ ID NO: 7588 - protein, 20 aa, Artificial Sequence
  Description of Artificial Sequence: Synthetic peptide
  MOD_RES (4)..(4): phosphorylated serine
RRFSGTVRKFFRKNWLRLTW

SEQ ID NO: 7589 - protein, 20 aa, Artificial Sequence
  Description of Artificial Sequence: Synthetic peptide
  MOD_RES (4)..(4): phosphorylated serine
RRFSGTVRLFFRKNWLRLTW

SEQ ID NO: 7590 - protein, 20 aa, Artificial Sequence
  Description of Artificial Sequence: Synthetic peptide
  MOD_RES (4)..(4): phosphorylated serine
RRFSGTVRMFFRKNWLRLTW

SEQ ID NO: 7591 - protein, 20 aa, Artificial Sequence
  Description of Artificial Sequence: Synthetic peptide
  MOD_RES (4)..(4): phosphorylated serine
RRFSGTVRRFFRKNWLRLTW

SEQ ID NO: 7592 - protein, 20 aa, Artificial Sequence
  Description of Artificial Sequence: Synthetic peptide
  MOD_RES (4)..(4): phosphorylated serine
RRFSIATLRFFRKNWLRLTW

SEQ ID NO: 7593 - protein, 20 aa, Artificial Sequence
  Description of Artificial Sequence: Synthetic peptide
  MOD_RES (4)..(4): phosphorylated serine
RRFSLTTLRFFRKNWLRLTW

SEQ ID NO: 7594 - protein, 22 aa, Artificial Sequence
  Description of Artificial Sequence: Synthetic peptide
  MOD_RES (4)..(4): phosphorylated serine
RRFSPDDKYSFFFRKNWLRLTW

SEQ ID NO: 7595 - protein, 22 aa, Artificial Sequence
  Description of Artificial Sequence: Synthetic peptide
  MOD_RES (4)..(4): phosphorylated serine
RRFSPDDKYSKFFRKNWLRLTW

SEQ ID NO: 7596 - protein, 22 aa, Artificial Sequence
  Description of Artificial Sequence: Synthetic peptide
  MOD_RES (4)..(4): phosphorylated serine
RRFSPDDKYSLFFRKNWLRLTW

SEQ ID NO: 7597 - protein, 22 aa, Artificial Sequence
  Description of Artificial Sequence: Synthetic peptide
  MOD_RES (4)..(4): phosphorylated serine
RRFSPDDKYSMFFRKNWLRLTW

SEQ ID NO: 7598 - protein, 20 aa, Artificial Sequence
  Description of Artificial Sequence: Synthetic peptide
  MOD_RES (4)..(4): phosphorylated serine
RRFSPPRRFFFRKNWLRLTW

SEQ ID NO: 7599 - protein, 20 aa, Artificial Sequence
  Description of Artificial Sequence: Synthetic peptide
  MOD_RES (4)..(4): phosphorylated serine
RRFSPPRRKFFRKNWLRLTW

SEQ ID NO: 7600 - protein, 20 aa, Artificial Sequence
  Description of Artificial Sequence: Synthetic peptide
  MOD_RES (4)..(4): phosphorylated serine
RRFSPPRRLFFRKNWLRLTW

SEQ ID NO: 7601 - protein, 20 aa, Artificial Sequence
  Description of Artificial Sequence: Synthetic peptide
  MOD_RES (4)..(4): phosphorylated serine
  MOD_RES (9)..(9): oxidized methionine
RRFSPPRRMFFRKNWLRLTW

SEQ ID NO: 7602 - protein, 20 aa, Artificial Sequence
  Description of Artificial Sequence: Synthetic peptide
  MOD_RES (4)..(4): phosphorylated serine
RRFSPPRRMFFRKNWLRLTW

SEQ ID NO: 7603 - protein, 20 aa, Artificial Sequence
  Description of Artificial Sequence: Synthetic peptide
  MOD_RES (4)..(4): phosphorylated serine
RRFSPPRRRFFRKNWLRLTW

SEQ ID NO: 7604 - protein, 20 aa, Artificial Sequence
  Description of Artificial Sequence: Synthetic peptide
  MOD_RES (4)..(4): phosphorylated serine
RRFSPPRRYFFRKNWLRLTW

SEQ ID NO: 7605 - protein, 21 aa, Artificial Sequence
  Description of Artificial Sequence: Synthetic peptide
  MOD_RES (4)..(4): phosphorylated serine
RRFSRLENRYFFRKNWLRLTW

SEQ ID NO: 7606 - protein, 20 aa, Artificial Sequence
  Description of Artificial Sequence: Synthetic peptide
  MOD_RES (4)..(4): phosphorylated serine
RRFSRSDELFFRKNWLRLTW

SEQ ID NO: 7607 - protein, 20 aa, Artificial Sequence
  Description of Artificial Sequence: Synthetic peptide
  MOD_RES (4)..(4): phosphorylated serine
  MOD_RES (6)..(6): phosphorylated serine
RRFSRSPIFFFRKNWLRLTW

SEQ ID NO: 7608 - protein, 20 aa, Artificial Sequence
  Description of Artificial Sequence: Synthetic peptide
  MOD_RES (4)..(4): phosphorylated serine
RRFSRSPIFFFRKNWLRLTW

SEQ ID NO: 7609 - protein, 20 aa, Artificial Sequence
  Description of Artificial Sequence: Synthetic peptide
  MOD_RES (4)..(4): phosphorylated serine
  MOD_RES (6)..(6): phosphorylated serine
RRFSRSPIKFFRKNWLRLTW

SEQ ID NO: 7610 - protein, 20 aa, Artificial Sequence
  Description of Artificial Sequence: Synthetic peptide
  MOD_RES (4)..(4): phosphorylated serine
RRFSRSPIKFFRKNWLRLTW

SEQ ID NO: 7611 - protein, 20 aa, Artificial Sequence
  Description of Artificial Sequence: Synthetic peptide
  MOD_RES (4)..(4): phosphorylated serine
  MOD_RES (6)..(6): phosphorylated serine
RRFSRSPILFFRKNWLRLTW

SEQ ID NO: 7612 - protein, 20 aa, Artificial Sequence
  Description of Artificial Sequence: Synthetic peptide
  MOD_RES (4)..(4): phosphorylated serine
RRFSRSPILFFRKNWLRLTW

SEQ ID NO: 7613 - protein, 20 aa, Artificial Sequence
  Description of Artificial Sequence: Synthetic peptide
  MOD_RES (4)..(4): phosphorylated serine
RRFSRSPIMFFRKNWLRLTW

SEQ ID NO: 7614 - protein, 20 aa, Artificial Sequence
  Description of Artificial Sequence: Synthetic peptide
  MOD_RES (4)..(4): phosphorylated serine
  MOD_RES (6)..(6): phosphorylated serine
RRFSRSPIRFFRKNWLRLTW

SEQ ID NO: 7615 - protein, 20 aa, Artificial Sequence
  Description of Artificial Sequence: Synthetic peptide
  MOD_RES (4)..(4): phosphorylated serine
RRFSRSPIRFFRKNWLRLTW

SEQ ID NO: 7616 - protein, 20 aa, Artificial Sequence
  Description of Artificial Sequence: Synthetic peptide
  MOD_RES (6)..(6): phosphorylated serine
RRFSRSPIRFFRKNWLRLTW

SEQ ID NO: 7617 - protein, 21 aa, Artificial Sequence
  Description of Artificial Sequence: Synthetic peptide
  MOD_RES (4)..(4): phosphorylated serine
  MOD_RES (6)..(6): phosphorylated serine
RRFSRSPIRFFFRKNWLRLTW

SEQ ID NO: 7618 - protein, 21 aa, Artificial Sequence
  Description of Artificial Sequence: Synthetic peptide
  MOD_RES (4)..(4): phosphorylated serine
RRFSRSPIRFFFRKNWLRLTW

SEQ ID NO: 7619 - protein, 21 aa, Artificial Sequence
  Description of Artificial Sequence: Synthetic peptide
  MOD_RES (4)..(4): phosphorylated serine
  MOD_RES (6)..(6): phosphorylated serine
RRFSRSPIRKFFRKNWLRLTW

SEQ ID NO: 7620 - protein, 21 aa, Artificial Sequence
  Description of Artificial Sequence: Synthetic peptide
  MOD_RES (4)..(4): phosphorylated serine
RRFSRSPIRKFFRKNWLRLTW

SEQ ID NO: 7621 - protein, 21 aa, Artificial Sequence
  Description of Artificial Sequence: Synthetic peptide
  MOD_RES (4)..(4): phosphorylated serine
  MOD_RES (6)..(6): phosphorylated serine
RRFSRSPIRLFFRKNWLRLTW

SEQ ID NO: 7622 - protein, 21 aa, Artificial Sequence
  Description of Artificial Sequence: Synthetic peptide
  MOD_RES (4)..(4): phosphorylated serine
RRFSRSPIRLFFRKNWLRLTW

SEQ ID NO: 7623 - protein, 21 aa, Artificial Sequence
  Description of Artificial Sequence: Synthetic peptide
  MOD_RES (4)..(4): phosphorylated serine
  MOD_RES (6)..(6): phosphorylated serine
RRFSRSPIRRFFRKNWLRLTW

SEQ ID NO: 7624 - protein, 21 aa, Artificial Sequence
  Description of Artificial Sequence: Synthetic peptide
  MOD_RES (4)..(4): phosphorylated serine
RRFSRSPIRRFFRKNWLRLTW

SEQ ID NO: 7625 - protein, 21 aa, Artificial Sequence
  Description of Artificial Sequence: Synthetic peptide
  MOD_RES (4)..(4): phosphorylated serine
  MOD_RES (6)..(6): phosphorylated serine
RRFSRSPIRYFFRKNWLRLTW

SEQ ID NO: 7626 - protein, 21 aa, Artificial Sequence
  Description of Artificial Sequence: Synthetic peptide
  MOD_RES (4)..(4): phosphorylated serine
RRFSRSPIRYFFRKNWLRLTW

SEQ ID NO: 7627 - protein, 20 aa, Artificial Sequence
  Description of Artificial Sequence: Synthetic peptide
  MOD_RES (4)..(4): phosphorylated serine
  MOD_RES (6)..(6): phosphorylated serine
RRFSRSPIYFFRKNWLRLTW

SEQ ID NO: 7628 - protein, 20 aa, Artificial Sequence
  Description of Artificial Sequence: Synthetic peptide
  MOD_RES (4)..(4): phosphorylated serine
RRFSRSPIYFFRKNWLRLTW

SEQ ID NO: 7629 - protein, 19 aa, Artificial Sequence
  Description of Artificial Sequence: Synthetic peptide
  MOD_RES (4)..(4): phosphorylated serine
RRFSRSPKFFRKNWLRLTW

SEQ ID NO: 7630 - protein, 21 aa, Artificial Sequence
  Description of Artificial Sequence: Synthetic peptide
  MOD_RES (5)..(5): phosphorylated serine
RRFSSPPRRMFFRKNWLRLTW

SEQ ID NO: 7631 - protein, 20 aa, Artificial Sequence
  Description of Artificial Sequence: Synthetic peptide
  MOD_RES (4)..(4): phosphorylated serine
RRFSVSTLRFFRKNWLRLTW

SEQ ID NO: 7632 - protein, 20 aa, Artificial Sequence
  Description of Artificial Sequence: Synthetic peptide
  MOD_RES (4)..(4): phosphorylated serine
RRFSVTTMRFFRKNWLRLTW

SEQ ID NO: 7633 - protein, 21 aa, Artificial Sequence
  Description of Artificial Sequence: Synthetic peptide
  MOD_RES (4)..(4): phosphorylated threonine
RRFTPPSPAFFFRKNWLRLTW

SEQ ID NO: 7634 - protein, 21 aa, Artificial Sequence
  Description of Artificial Sequence: Synthetic peptide
  MOD_RES (4)..(4): phosphorylated threonine
RRFTPPSPAKFFRKNWLRLTW

SEQ ID NO: 7635 - protein, 21 aa, Artificial Sequence
  Description of Artificial Sequence: Synthetic peptide
  MOD_RES (4)..(4): phosphorylated threonine
RRFTPPSPARFFRKNWLRLTW

SEQ ID NO: 7636 - protein, 21 aa, Artificial Sequence
  Description of Artificial Sequence: Synthetic peptide
  MOD_RES (4)..(4): phosphorylated threonine
RRFTPPSPAYFFRKNWLRLTW

SEQ ID NO: 7637 - protein, 20 aa, Artificial Sequence
  Description of Artificial Sequence: Synthetic peptide
  MOD_RES (4)..(4): phosphorylated serine
RRGSFEVTLFFRKNWLRLTW

SEQ ID NO: 7638 - protein, 22 aa, Artificial Sequence
  Description of Artificial Sequence: Synthetic peptide
  MOD_RES (4)..(4): phosphorylated serine
RRHSASNLHALFFRKNWLRLTW

SEQ ID NO: 7639 - protein, 21 aa, Artificial Sequence
  Description of Artificial Sequence: Synthetic peptide
  MOD_RES (6)..(6): phosphorylated serine
RRIDISPSTFFFRKNWLRLTW

SEQ ID NO: 7640 - protein, 21 aa, Artificial Sequence
  Description of Artificial Sequence: Synthetic peptide
  MOD_RES (6)..(6): phosphorylated serine
RRIDISPSTKFFRKNWLRLTW

SEQ ID NO: 7641 - protein, 22 aa, Artificial Sequence
  Description of Artificial Sequence: Synthetic peptide
  MOD_RES (6)..(6): phosphorylated serine
RRIDISPSTLRFFRKNWLRLTW

SEQ ID NO: 7642 - protein, 23 aa, Artificial Sequence
  Description of Artificial Sequence: Synthetic peptide
  MOD_RES (6)..(6): phosphorylated serine
RRIDISPSTLRKFFRKNWLRLTW

SEQ ID NO: 7643 - protein, 21 aa, Artificial Sequence
  Description of Artificial Sequence: Synthetic peptide
  MOD_RES (6)..(6): phosphorylated serine
RRIDISPSTRFFRKNWLRLTW

SEQ ID NO: 7644 - protein, 21 aa, Artificial Sequence
  Description of Artificial Sequence: Synthetic peptide
  MOD_RES (6)..(6): phosphorylated serine
RRIDISPSTYFFRKNWLRLTW

SEQ ID NO: 7645 - protein, 20 aa, Artificial Sequence
  Description of Artificial Sequence: Synthetic peptide
  MOD_RES (4)..(4): phosphorylated serine
RRISDPEVFFFRKNWLRLTW

SEQ ID NO: 7646 - protein, 20 aa, Artificial Sequence
  Description of Artificial Sequence: Synthetic peptide
  MOD_RES (4)..(4): phosphorylated serine
RRISDPQVFFFRKNWLRLTW

SEQ ID NO: 7647 - protein, 20 aa, Artificial Sequence
  Description of Artificial Sequence: Synthetic peptide
  MOD_RES (4)..(4): phosphorylated serine
RRISGVDRFFFRKNWLRLTW

SEQ ID NO: 7648 - protein, 20 aa, Artificial Sequence
  Description of Artificial Sequence: Synthetic peptide
  MOD_RES (4)..(4): phosphorylated serine
RRISGVDRKFFRKNWLRLTW

SEQ ID NO: 7649 - protein, 20 aa, Artificial Sequence
  Description of Artificial Sequence: Synthetic peptide
  MOD_RES (4)..(4): phosphorylated serine
RRISGVDRLFFRKNWLRLTW

SEQ ID NO: 7650 - protein, 20 aa, Artificial Sequence
  Description of Artificial Sequence: Synthetic peptide
  MOD_RES (4)..(4): phosphorylated serine
RRISGVDRMFFRKNWLRLTW

SEQ ID NO: 7651 - protein, 20 aa, Artificial Sequence
  Description of Artificial Sequence: Synthetic peptide
  MOD_RES (4)..(4): phosphorylated serine
RRISGVDRRFFRKNWLRLTW

SEQ ID NO: 7652 - protein, 20 aa, Artificial Sequence
  Description of Artificial Sequence: Synthetic peptide
  MOD_RES (4)..(4): phosphorylated serine
RRISGVDRYFFRKNWLRLTW

SEQ ID NO: 7653 - protein, 21 aa, Artificial Sequence
  Description of Artificial Sequence: Synthetic peptide
  MOD_RES (4)..(4): phosphorylated serine
RRISGVDRYFFFRKNWLRLTW

SEQ ID NO: 7654 - protein, 21 aa, Artificial Sequence
  Description of Artificial Sequence: Synthetic peptide
  MOD_RES (4)..(4): phosphorylated serine
RRISGVDRYKFFRKNWLRLTW

SEQ ID NO: 7655 - protein, 21 aa, Artificial Sequence
  Description of Artificial Sequence: Synthetic peptide
  MOD_RES (4)..(4): phosphorylated serine
RRISGVDRYLFFRKNWLRLTW

SEQ ID NO: 7656 - protein, 21 aa, Artificial Sequence
  Description of Artificial Sequence: Synthetic peptide
  MOD_RES (4)..(4): phosphorylated serine
RRISGVDRYRFFRKNWLRLTW

SEQ ID NO: 7657 - protein, 21 aa, Artificial Sequence
  Description of Artificial Sequence: Synthetic peptide
  MOD_RES (4)..(4): phosphorylated serine
RRISGVDRYYFFRKNWLRLTW

SEQ ID NO: 7658 - protein, 20 aa, Artificial Sequence
  Description of Artificial Sequence: Synthetic peptide
  MOD_RES (4)..(4): phosphorylated serine
RRISPAPQRFFRKNWLRLTW

SEQ ID NO: 7659 - protein, 20 aa, Artificial Sequence
  Description of Artificial Sequence: Synthetic peptide
  MOD_RES (4)..(4): phosphorylated serine
RRISQIQQLFFRKNWLRLTW

SEQ ID NO: 7660 - protein, 20 aa, Artificial Sequence
  Description of Artificial Sequence: Synthetic peptide
  MOD_RES (4)..(4): phosphorylated serine
RRKSQVAEFFFRKNWLRLTW

SEQ ID NO: 7661 - protein, 20 aa, Artificial Sequence
  Description of Artificial Sequence: Synthetic peptide
  MOD_RES (4)..(4): phosphorylated serine
RRKSQVAEKFFRKNWLRLTW

SEQ ID NO: 7662 - protein, 20 aa, Artificial Sequence
  Description of Artificial Sequence: Synthetic peptide
  MOD_RES (4)..(4): phosphorylated serine
RRKSPPPSFFFRKNWLRLTW

SEQ ID NO: 7663 - protein, 20 aa, Artificial Sequence
  Description of Artificial Sequence: Synthetic peptide
  MOD_RES (4)..(4): phosphorylated serine
RRKSPPPSKFFRKNWLRLTW

SEQ ID NO: 7664 - protein, 20 aa, Artificial Sequence
  Description of Artificial Sequence: Synthetic peptide
  MOD_RES (4)..(4): phosphorylated serine
RRKSPPPSLFFRKNWLRLTW

SEQ ID NO: 7665 - protein, 20 aa, Artificial Sequence
  Description of Artificial Sequence: Synthetic peptide
  MOD_RES (4)..(4): phosphorylated serine
RRKSPPPSMFFRKNWLRLTW

SEQ ID NO: 7666 - protein, 20 aa, Artificial Sequence
  Description of Artificial Sequence: Synthetic peptide
  MOD_RES (4)..(4): phosphorylated serine
RRKSPPPSRFFRKNWLRLTW

SEQ ID NO: 7667 - protein, 20 aa, Artificial Sequence
  Description of Artificial Sequence: Synthetic peptide
  MOD_RES (4)..(4): phosphorylated serine
RRKSQLDSFFFRKNWLRLTW

SEQ ID NO: 7668 - protein, 20 aa, Artificial Sequence
  Description of Artificial Sequence: Synthetic peptide
  MOD_RES (4)..(4): phosphorylated serine
RRKSQLDSKFFRKNWLRLTW

SEQ ID NO: 7669 - protein, 20 aa, Artificial Sequence
  Description of Artificial Sequence: Synthetic peptide
  MOD_RES (4)..(4): phosphorylated serine
RRKSQLDSLFFRKNWLRLTW

SEQ ID NO: 7670 - protein, 20 aa, Artificial Sequence
  Description of Artificial Sequence: Synthetic peptide
  MOD_RES (4)..(4): phosphorylated serine
RRKSQLDSMFFRKNWLRLTW

SEQ ID NO: 7671 - protein, 20 aa, Artificial Sequence
  Description of Artificial Sequence: Synthetic peptide
  MOD_RES (4)..(4): phosphorylated serine
RRKSQLDSRFFRKNWLRLTW

SEQ ID NO: 7672 - protein, 20 aa, Artificial Sequence
  Description of Artificial Sequence: Synthetic peptide
  MOD_RES (4)..(4): phosphorylated serine
RRKSQLDSYFFRKNWLRLTW

SEQ ID NO: 7673 - protein, 20 aa, Artificial Sequence
  Description of Artificial Sequence: Synthetic peptide
  MOD_RES (4)..(4): phosphorylated serine
RRKSQVAEFFFRKNWLRLTW

SEQ ID NO: 7674 - protein, 20 aa, Artificial Sequence
  Description of Artificial Sequence: Synthetic peptide
  MOD_RES (4)..(4): phosphorylated serine
RRKSQVAEKFFRKNWLRLTW

SEQ ID NO: 7675 - protein, 20 aa, Artificial Sequence
  Description of Artificial Sequence: Synthetic peptide
  MOD_RES (4)..(4): phosphorylated serine
RRKSQVAELFFRKNWLRLTW

SEQ ID NO: 7676 - protein, 20 aa, Artificial Sequence
  Description of Artificial Sequence: Synthetic peptide
  MOD_RES (4)..(4): phosphorylated serine
RRKSQVAEMFFRKNWLRLTW

SEQ ID NO: 7677 - protein, 20 aa, Artificial Sequence
  Description of Artificial Sequence: Synthetic peptide
  MOD_RES (4)..(4): phosphorylated serine
RRKSQVAERFFRKNWLRLTW

SEQ ID NO: 7678 - protein, 20 aa, Artificial Sequence
  Description of Artificial Sequence: Synthetic peptide
  MOD_RES (4)..(4): phosphorylated serine
RRKSQVAEVFFRKNWLRLTW

SEQ ID NO: 7679 - protein, 20 aa, Artificial Sequence
  Description of Artificial Sequence: Synthetic peptide
  MOD_RES (4)..(4): phosphorylated serine
RRKSQVAEYFFRKNWLRLTW

SEQ ID NO: 7680 - protein, 20 aa, Artificial Sequence
  Description of Artificial Sequence: Synthetic peptide
  MOD_RES (5)..(5): phosphorylated serine
RRLGSPHRFFFRKNWLRLTW

SEQ ID NO: 7681 - protein, 20 aa, Artificial Sequence
  Description of Artificial Sequence: Synthetic peptide
  MOD_RES (5)..(5): phosphorylated serine
RRLGSPHRKFFRKNWLRLTW

SEQ ID NO: 7682 - protein, 20 aa, Artificial Sequence
  Description of Artificial Sequence: Synthetic peptide
  MOD_RES (5)..(5): phosphorylated serine
RRLGSPHRLFFRKNWLRLTW

SEQ ID NO: 7683 - protein, 20 aa, Artificial Sequence
  Description of Artificial Sequence: Synthetic peptide
  MOD_RES (5)..(5): phosphorylated serine
RRLGSPHRMFFRKNWLRLTW

SEQ ID NO: 7684 - protein, 20 aa, Artificial Sequence
  Description of Artificial Sequence: Synthetic peptide
  MOD_RES (5)..(5): phosphorylated serine
RRLGSPHRRFFRKNWLRLTW

SEQ ID NO: 7685 - protein, 20 aa, Artificial Sequence
  Description of Artificial Sequence: Synthetic peptide
  MOD_RES (4)..(4): phosphorylated serine
RRLSADIRFFFRKNWLRLTW

SEQ ID NO: 7686 - protein, 20 aa, Artificial Sequence
  Description of Artificial Sequence: Synthetic peptide
  MOD_RES (4)..(4): phosphorylated serine
RRLSADIRKFFRKNWLRLTW

SEQ ID NO: 7687 - protein, 20 aa, Artificial Sequence
  Description of Artificial Sequence: Synthetic peptide
  MOD_RES (4)..(4): phosphorylated serine
RRLSADIRLFFRKNWLRLTW

SEQ ID NO: 7688 - protein, 20 aa, Artificial Sequence
  Description of Artificial Sequence: Synthetic peptide
  MOD_RES (4)..(4): phosphorylated serine
RRLSADIRMFFRKNWLRLTW

SEQ ID NO: 7689 - protein, 20 aa, Artificial Sequence
  Description of Artificial Sequence: Synthetic peptide
  MOD_RES (4)..(4): phosphorylated serine
RRLSADIRRFFRKNWLRLTW

SEQ ID NO: 7690 - protein, 20 aa, Artificial Sequence
  Description of Artificial Sequence: Synthetic peptide
  MOD_RES (4)..(4): phosphorylated serine
RRLSADIRYFFRKNWLRLTW

SEQ ID NO: 7691 - protein, 20 aa, Artificial Sequence
  Description of Artificial Sequence: Synthetic peptide
  MOD_RES (4)..(4): phosphorylated serine
RRLSDSPVFFFRKNWLRLTW

SEQ ID NO: 7692 - protein, 20 aa, Artificial Sequence
  Description of Artificial Sequence: Synthetic peptide
  MOD_RES (4)..(4): phosphorylated serine
RRLSELLRYFFRKNWLRLTW

SEQ ID NO: 7693 - protein, 20 aa, Artificial Sequence
  Description of Artificial Sequence: Synthetic peptide
  MOD_RES (4)..(4): phosphorylated serine
RRLSERETRFFRKNWLRLTW

SEQ ID NO: 7694 - protein, 20 aa, Artificial Sequence
  Description of Artificial Sequence: Synthetic peptide
  MOD_RES (4)..(4): phosphorylated serine
RRLSESSALFFRKNWLRLTW

SEQ ID NO: 7695 - protein, 20 aa, Artificial Sequence
  Description of Artificial Sequence: Synthetic peptide
  MOD_RES (4)..(4): phosphorylated serine
RRLSFLVSFFFRKNWLRLTW

SEQ ID NO: 7696 - protein, 20 aa, Artificial Sequence
  Description of Artificial Sequence: Synthetic peptide
  MOD_RES (4)..(4): phosphorylated serine
RRLSFLVSKFFRKNWLRLTW

SEQ ID NO: 7697 - protein, 20 aa, Artificial Sequence
  Description of Artificial Sequence: Synthetic peptide
  MOD_RES (4)..(4): phosphorylated serine
RRLSFLVSLFFRKNWLRLTW

SEQ ID NO: 7698 - protein, 20 aa, Artificial Sequence
  Description of Artificial Sequence: Synthetic peptide
  MOD_RES (4)..(4): phosphorylated serine
RRLSFLVSMFFRKNWLRLTW

SEQ ID NO: 7699 - protein, 20 aa, Artificial Sequence
  Description of Artificial Sequence: Synthetic peptide
  MOD_RES (4)..(4): phosphorylated serine
RRLSFLVSRFFRKNWLRLTW

SEQ ID NO: 7700 - protein, 20 aa, Artificial Sequence
  Description of Artificial Sequence: Synthetic peptide
  MOD_RES (4)..(4): phosphorylated serine
RRLSFLVSYFFRKNWLRLTW

SEQ ID NO: 7701 - protein, 21 aa, Artificial Sequence
  Description of Artificial Sequence: Synthetic peptide
  MOD_RES (4)..(4): phosphorylated serine
RRLSGGSHSFFFRKNWLRLTW

SEQ ID NO: 7702 - protein, 21 aa, Artificial Sequence
  Description of Artificial Sequence: Synthetic peptide
  MOD_RES (4)..(4): phosphorylated serine
RRLSGGSHSKFFRKNWLRLTW

SEQ ID NO: 7703 - protein, 21 aa, Artificial Sequence
  Description of Artificial Sequence: Synthetic peptide
  MOD_RES (4)..(4): phosphorylated serine
RRLSGGSHSLFFRKNWLRLTW

SEQ ID NO: 7704 - protein, 21 aa, Artificial Sequence
  Description of Artificial Sequence: Synthetic peptide
  MOD_RES (4)..(4): phosphorylated serine
RRLSGGSHSMFFRKNWLRLTW

SEQ ID NO: 7705 - protein, 21 aa, Artificial Sequence
  Description of Artificial Sequence: Synthetic peptide
  MOD_RES (4)..(4): phosphorylated serine
RRLSGGSHSRFFRKNWLRLTW

SEQ ID NO: 7706 - protein, 21 aa, Artificial Sequence
  Description of Artificial Sequence: Synthetic peptide
  MOD_RES (4)..(4): phosphorylated serine
RRLSGGSHSYFFRKNWLRLTW

SEQ ID NO: 7707 - protein, 21 aa, Artificial Sequence
  Description of Artificial Sequence: Synthetic peptide
  MOD_RES (4)..(4): phosphorylated serine
RRLSGPLHTFFFRKNWLRLTW

SEQ ID NO: 7708 - protein, 21 aa, Artificial Sequence
  Description of Artificial Sequence: Synthetic peptide
  MOD_RES (4)..(4): phosphorylated serine
RRLSGPLHTKFFRKNWLRLTW

SEQ ID NO: 7709 - protein, 21 aa, Artificial Sequence
  Description of Artificial Sequence: Synthetic peptide
  MOD_RES (4)..(4): phosphorylated serine
RRLSGPLHTLFFRKNWLRLTW

SEQ ID NO: 7710 - protein, 21 aa, Artificial Sequence
  Description of Artificial Sequence: Synthetic peptide
  MOD_RES (4)..(4): phosphorylated serine
RRLSGPLHTMFFRKNWLRLTW

SEQ ID NO: 7711 - protein, 21 aa, Artificial Sequence
  Description of Artificial Sequence: Synthetic peptide
  MOD_RES (4)..(4): phosphorylated serine
RRLSGPLHTRFFRKNWLRLTW

SEQ ID NO: 7712 - protein, 21 aa, Artificial Sequence
  Description of Artificial Sequence: Synthetic peptide
  MOD_RES (4)..(4): phosphorylated serine
RRLSGPLHTVFFRKNWLRLTW

SEQ ID NO: 7713 - protein, 21 aa, Artificial Sequence
  Description of Artificial Sequence: Synthetic peptide
  MOD_RES (4)..(4): phosphorylated serine
RRLSGPLHTYFFRKNWLRLTW

SEQ ID NO: 7714 - protein, 20 aa, Artificial Sequence
  Description of Artificial Sequence: Synthetic peptide
  MOD_RES (4)..(4): phosphorylated serine
RRLSLFLNVFFRKNWLRLTW

SEQ ID NO: 7715 - protein, 20 aa, Artificial Sequence
  Description of Artificial Sequence: Synthetic peptide
  MOD_RES (4)..(4): phosphorylated serine
RRLSNLPTFFFRKNWLRLTW

SEQ ID NO: 7716 - protein, 20 aa, Artificial Sequence
  Description of Artificial Sequence: Synthetic peptide
  MOD_RES (4)..(4): phosphorylated serine
RRLSNLPTKFFRKNWLRLTW

SEQ ID NO: 7717 - protein, 20 aa, Artificial Sequence
  Description of Artificial Sequence: Synthetic peptide
  MOD_RES (4)..(4): phosphorylated serine
RRLSNLPTRFFRKNWLRLTW

SEQ ID NO: 7718 - protein, 20 aa, Artificial Sequence
  Description of Artificial Sequence: Synthetic peptide
  MOD_RES (4)..(4): phosphorylated serine
RRLSNLPTVFFRKNWLRLTW

SEQ ID NO: 7719 - protein, 20 aa, Artificial Sequence
  Description of Artificial Sequence: Synthetic peptide
  MOD_RES (4)..(4): phosphorylated serine
RRLSNLPTYFFRKNWLRLTW

SEQ ID NO: 7720 - protein, 20 aa, Artificial Sequence
  Description of Artificial Sequence: Synthetic peptide
  MOD_RES (4)..(4): phosphorylated serine
RRLSPAPQFFFRKNWLRLTW

SEQ ID NO: 7721 - protein, 20 aa, Artificial Sequence
  Description of Artificial Sequence: Synthetic peptide
  MOD_RES (4)..(4): phosphorylated serine
RRLSPAPQKFFRKNWLRLTW

SEQ ID NO: 7722 - protein, 20 aa, Artificial Sequence
  Description of Artificial Sequence: Synthetic peptide
  MOD_RES (4)..(4): phosphorylated serine
RRLSPAPQLFFRKNWLRLTW

SEQ ID NO: 7723 - protein, 20 aa, Artificial Sequence
  Description of Artificial Sequence: Synthetic peptide
  MOD_RES (4)..(4): phosphorylated serine
RRLSPAPQMFFRKNWLRLTW

SEQ ID NO: 7724 - protein, 22 aa, Artificial Sequence
  Description of Artificial Sequence: Synthetic peptide
  MOD_RES (4)..(4): phosphorylated serine
RRLSPKASQVFFFRKNWLRLTW

SEQ ID NO: 7725 - protein, 22 aa, Artificial Sequence
  Description of Artificial Sequence: Synthetic peptide
  MOD_RES (4)..(4): phosphorylated serine
RRLSPKASQVKFFRKNWLRLTW

SEQ ID NO: 7726 - protein, 22 aa, Artificial Sequence
  Description of Artificial Sequence: Synthetic peptide
  MOD_RES (4)..(4): phosphorylated serine
RRLSPKASQVLFFRKNWLRLTW

SEQ ID NO: 7727 - protein, 22 aa, Artificial Sequence
  Description of Artificial Sequence: Synthetic peptide
  MOD_RES (4)..(4): phosphorylated serine
RRLSPKASQVMFFRKNWLRLTW

SEQ ID NO: 7728 - protein, 22 aa, Artificial Sequence
  Description of Artificial Sequence: Synthetic peptide
  MOD_RES (4)..(4): phosphorylated serine
RRLSPKASQVRFFRKNWLRLTW

SEQ ID NO: 7729 - protein, 21 aa, Artificial Sequence
  Description of Artificial Sequence: Synthetic peptide
  MOD_RES (4)..(4): phosphorylated serine
RRLSPVPVPFFFRKNWLRLTW

SEQ ID NO: 7730 - protein, 21 aa, Artificial Sequence
  Description of Artificial Sequence: Synthetic peptide
  MOD_RES (4)..(4): phosphorylated serine
RRLSPVPVPKFFRKNWLRLTW

SEQ ID NO: 7731 - protein, 21 aa, Artificial Sequence
  Description of Artificial Sequence: Synthetic peptide
  MOD_RES (4)..(4): phosphorylated serine
RRLSPVPVPLFFRKNWLRLTW

SEQ ID NO: 7732 - protein, 21 aa, Artificial Sequence
  Description of Artificial Sequence: Synthetic peptide
  MOD_RES (4)..(4): phosphorylated serine
RRLSPVPVPMFFRKNWLRLTW

SEQ ID NO: 7733 - protein, 21 aa, Artificial Sequence
  Description of Artificial Sequence: Synthetic peptide
  MOD_RES (4)..(4): phosphorylated serine
RRLSPVPVPRFFRKNWLRLTW

SEQ ID NO: 7734 - protein, 20 aa, Artificial Sequence
  Description of Artificial Sequence: Synthetic peptide
  MOD_RES (4)..(4): phosphorylated serine
RRLSRELQKFFRKNWLRLTW

SEQ ID NO: 7735 - protein, 20 aa, Artificial Sequence
  Description of Artificial Sequence: Synthetic peptide
  MOD_RES (4)..(4): phosphorylated serine
RRLSRELQFFFRKNWLRLTW

SEQ ID NO: 7736 - protein, 20 aa, Artificial Sequence
  Description of Artificial Sequence: Synthetic peptide
  MOD_RES (4)..(4): phosphorylated serine
RRLSRELQLFFRKNWLRLTW

SEQ ID NO: 7737 - protein, 20 aa, Artificial Sequence
  Description of Artificial Sequence: Synthetic peptide
  MOD_RES (4)..(4): phosphorylated serine
RRLSRELQMFFRKNWLRLTW

SEQ ID NO: 7738 - protein, 20 aa, Artificial Sequence
  Description of Artificial Sequence: Synthetic peptide
  MOD_RES (4)..(4): phosphorylated serine
RRLSRELQRFFRKNWLRLTW

SEQ ID NO: 7739 - protein, 20 aa, Artificial Sequence
  Description of Artificial Sequence: Synthetic peptide
  MOD_RES (4)..(4): phosphorylated serine
RRLSRKLSLFFRKNWLRLTW

SEQ ID NO: 7740 - protein, 20 aa, Artificial Sequence
  Description of Artificial Sequence: Synthetic peptide
  MOD_RES (4)..(4): phosphorylated serine
RRLSVERIFFFRKNWLRLTW

SEQ ID NO: 7741 - protein, 20 aa, Artificial Sequence
  Description of Artificial Sequence: Synthetic peptide
  MOD_RES (4)..(4): phosphorylated serine
RRLSVERIKFFRKNWLRLTW

SEQ ID NO: 7742 - protein, 20 aa, Artificial Sequence
  Description of Artificial Sequence: Synthetic peptide
  MOD_RES (4)..(4): phosphorylated serine
RRLSVERIMFFRKNWLRLTW

SEQ ID NO: 7743 - protein, 20 aa, Artificial Sequence
  Description of Artificial Sequence: Synthetic peptide
  MOD_RES (4)..(4): phosphorylated serine
RRLSVERIRFFRKNWLRLTW

SEQ ID NO: 7744 - protein, 20 aa, Artificial Sequence
  Description of Artificial Sequence: Synthetic peptide
  MOD_RES (4)..(4): phosphorylated serine
RRLSYVLFIFFRKNWLRLTW

SEQ ID NO: 7745 - protein, 19 aa, Artificial Sequence
  Description of Artificial Sequence: Synthetic peptide
  MOD_RES (7)..(7): phosphorylated serine
RRLTHLSFFFRKNWLRLTW

SEQ ID NO: 7746 - protein, 19 aa, Artificial Sequence
  Description of Artificial Sequence: Synthetic peptide
  MOD_RES (7)..(7): phosphorylated serine
RRLTHLSKFFRKNWLRLTW

SEQ ID NO: 7747 - protein, 19 aa, Artificial Sequence
  Description of Artificial Sequence: Synthetic peptide
  MOD_RES (7)..(7): phosphorylated serine
RRLTHLSLFFRKNWLRLTW

SEQ ID NO: 7748 - protein, 19 aa, Artificial Sequence
  Description of Artificial Sequence: Synthetic peptide
  MOD_RES (7)..(7): phosphorylated serine
RRLTHLSMFFRKNWLRLTW

SEQ ID NO: 7749 - protein, 19 aa, Artificial Sequence
  Description of Artificial Sequence: Synthetic peptide
  MOD_RES (7)..(7): phosphorylated serine
RRLTHLSRFFRKNWLRLTW

SEQ ID NO: 7750 - protein, 19 aa, Artificial Sequence
  Description of Artificial Sequence: Synthetic peptide
  MOD_RES (4)..(4): phosphorylated serine
RRMSFQKPFFRKNWLRLTW

SEQ ID NO: 7751 - protein, 20 aa, Artificial Sequence
  Description of Artificial Sequence: Synthetic peptide
  MOD_RES (4)..(4): phosphorylated serine
RRMSLLSVFFFRKNWLRLTW

SEQ ID NO: 7752 - protein, 20 aa, Artificial Sequence
  Description of Artificial Sequence: Synthetic peptide
  MOD_RES (4)..(4): phosphorylated serine
RRMSLLSVKFFRKNWLRLTW

SEQ ID NO: 7753 - protein, 20 aa, Artificial Sequence
  Description of Artificial Sequence: Synthetic peptide
  MOD_RES (4)..(4): phosphorylated serine
RRMSLLSVLFFRKNWLRLTW

SEQ ID NO: 7754 - protein, 20 aa, Artificial Sequence
  Description of Artificial Sequence: Synthetic peptide
  MOD_RES (4)..(4): phosphorylated serine
RRMSLLSVMFFRKNWLRLTW

SEQ ID NO: 7755 - protein, 20 aa, Artificial Sequence
  Description of Artificial Sequence: Synthetic peptide
  MOD_RES (4)..(4): phosphorylated serine
RRMSLLSVRFFRKNWLRLTW

SEQ ID NO: 7756 - protein, 20 aa, Artificial Sequence
  Description of Artificial Sequence: Synthetic peptide
  MOD_RES (3)..(3): oxidized methionine
  MOD_RES (4)..(4): phosphorylated serine
RRMSLLSVVFFRKNWLRLTW

SEQ ID NO: 7757 - protein, 20 aa, Artificial Sequence
  Description of Artificial Sequence: Synthetic peptide
  MOD_RES (4)..(4): phosphorylated serine
RRMSLLSVVFFRKNWLRLTW

SEQ ID NO: 7758 - protein, 20 aa, Artificial Sequence
  Description of Artificial Sequence: Synthetic peptide
  MOD_RES (4)..(4): phosphorylated serine
RRMSLLSVYFFRKNWLRLTW

SEQ ID NO: 7759 - protein, 19 aa, Artificial Sequence
  Description of Artificial Sequence: Synthetic peptide
  MOD_RES (4)..(4): phosphorylated serine
RRMSLLSWFFRKNWLRLTW

SEQ ID NO: 7760 - protein, 19 aa, Artificial Sequence
  Description of Artificial Sequence: Synthetic peptide
  MOD_RES (4)..(4): phosphorylated serine
RRMSLSVMFFRKNWLRLTW

SEQ ID NO: 7761 - protein, 20 aa, Artificial Sequence
  Description of Artificial Sequence: Synthetic peptide
  MOD_RES (4)..(4): phosphorylated serine
RRMSPIKPLFFRKNWLRLTW

SEQ ID NO: 7762 - protein, 20 aa, Artificial Sequence
  Description of Artificial Sequence: Synthetic peptide
  MOD_RES (4)..(4): phosphorylated serine
RRMSPKAQRFFRKNWLRLTW

SEQ ID NO: 7763 - protein, 20 aa, Artificial Sequence
  Description of Artificial Sequence: Synthetic peptide
  MOD_RES (4)..(4): phosphorylated serine
RRMSPKAQFFFRKNWLRLTW

SEQ ID NO: 7764 - protein, 20 aa, Artificial Sequence
  Description of Artificial Sequence: Synthetic peptide
  MOD_RES (4)..(4): phosphorylated serine
RRMSPKAQKFFRKNWLRLTW

SEQ ID NO: 7765 - protein, 20 aa, Artificial Sequence
  Description of Artificial Sequence: Synthetic peptide
  MOD_RES (4)..(4): phosphorylated serine
RRMSPKAQLFFRKNWLRLTW

SEQ ID NO: 7766 - protein, 20 aa, Artificial Sequence
  Description of Artificial Sequence: Synthetic peptide
  MOD_RES (4)..(4): phosphorylated serine
RRMSPKAQMFFRKNWLRLTW

SEQ ID NO: 7767 - protein, 19 aa, Artificial Sequence
  Description of Artificial Sequence: Synthetic peptide
  MOD_RES (4)..(4): phosphorylated serine
RRMSPKPFFFRKNWLRLTW

SEQ ID NO: 7768 - protein, 19 aa, Artificial Sequence
  Description of Artificial Sequence: Synthetic peptide
  MOD_RES (4)..(4): phosphorylated serine
RRMSPKPKFFRKNWLRLTW

SEQ ID NO: 7769 - protein, 19 aa, Artificial Sequence
  Description of Artificial Sequence: Synthetic peptide
  MOD_RES (4)..(4): phosphorylated serine
RRMSPKPMFFRKNWLRLTW

SEQ ID NO: 7770 - protein, 19 aa, Artificial Sequence
  Description of Artificial Sequence: Synthetic peptide
  MOD_RES (4)..(4): phosphorylated serine
RRMSPKPRFFRKNWLRLTW

SEQ ID NO: 7771 - protein, 20 aa, Artificial Sequence
  Description of Artificial Sequence: Synthetic peptide
  MOD_RES (4)..(4): phosphorylated serine
RRNSAPVSVFFRKNWLRLTW

SEQ ID NO: 7772 - protein, 20 aa, Artificial Sequence
  Description of Artificial Sequence: Synthetic peptide
  MOD_RES (4)..(4): phosphorylated serine
RRNSINRNFFFRKNWLRLTW

SEQ ID NO: 7773 - protein, 22 aa, Artificial Sequence
  Description of Artificial Sequence: Synthetic peptide
  MOD_RES (4)..(4): phosphorylated serine
RRNSNPVIAEFFFRKNWLRLTW

SEQ ID NO: 7774 - protein, 22 aa, Artificial Sequence
  Description of Artificial Sequence: Synthetic peptide
  MOD_RES (4)..(4): phosphorylated serine
RRNSNPVIAEKFFRKNWLRLTW

SEQ ID NO: 7775 - protein, 22 aa, Artificial Sequence
  Description of Artificial Sequence: Synthetic peptide
  MOD_RES (4)..(4): phosphorylated serine
RRNSNPVIAELFFRKNWLRLTW

SEQ ID NO: 7776 - protein, 22 aa, Artificial Sequence
  Description of Artificial Sequence: Synthetic peptide
  MOD_RES (4)..(4): phosphorylated serine
RRNSNPVIAEMFFRKNWLRLTW

SEQ ID NO: 7777 - protein, 22 aa, Artificial Sequence
  Description of Artificial Sequence: Synthetic peptide
  MOD_RES (4)..(4): phosphorylated serine
RRNSNPVIAERFFRKNWLRLTW

SEQ ID NO: 7778 - protein, 20 aa, Artificial Sequence
  Description of Artificial Sequence: Synthetic peptide
  MOD_RES (4)..(4): phosphorylated serine
RRNSSERTFFFRKNWLRLTW

SEQ ID NO: 7779 - protein, 20 aa, Artificial Sequence
  Description of Artificial Sequence: Synthetic peptide
  MOD_RES (4)..(4): phosphorylated serine
RRNSSERTKFFRKNWLRLTW

SEQ ID NO: 7780 - protein, 20 aa, Artificial Sequence
  Description of Artificial Sequence: Synthetic peptide
  MOD_RES (4)..(4): phosphorylated serine
RRNSSERTLFFRKNWLRLTW

SEQ ID NO: 7781 - protein, 20 aa, Artificial Sequence
  Description of Artificial Sequence: Synthetic peptide
  MOD_RES (4)..(4): phosphorylated serine
RRNSSERTMFFRKNWLRLTW

SEQ ID NO: 7782 - protein, 20 aa, Artificial Sequence
  Description of Artificial Sequence: Synthetic peptide
  MOD_RES (4)..(4): phosphorylated serine
RRNSSERTRFFRKNWLRLTW

SEQ ID NO: 7783 - protein, 20 aa, Artificial Sequence
  Description of Artificial Sequence: Synthetic peptide
  MOD_RES (4)..(4): phosphorylated serine
RRNSSERTYFFRKNWLRLTW

SEQ ID NO: 7784 - protein, 20 aa, Artificial Sequence
  Description of Artificial Sequence: Synthetic peptide
  MOD_RES (4)..(4): phosphorylated serine
RRNSSIVGFFFRKNWLRLTW

SEQ ID NO: 7785 - protein, 20 aa, Artificial Sequence
  Description of Artificial Sequence: Synthetic peptide
  MOD_RES (4)..(4): phosphorylated serine
RRNSSIVGKFFRKNWLRLTW

SEQ ID NO: 7786 - protein, 20 aa, Artificial Sequence
  Description of Artificial Sequence: Synthetic peptide
  MOD_RES (4)..(4): phosphorylated serine
RRNSSIVGLFFRKNWLRLTW

SEQ ID NO: 7787 - protein, 20 aa, Artificial Sequence
  Description of Artificial Sequence: Synthetic peptide
  MOD_RES (4)..(4): phosphorylated serine
RRNSSIVGMFFRKNWLRLTW

SEQ ID NO: 7788 - protein, 20 aa, Artificial Sequence
  Description of Artificial Sequence: Synthetic peptide
  MOD_RES (4)..(4): phosphorylated serine
RRNSSIVGRFFRKNWLRLTW

SEQ ID NO: 7789 - protein, 20 aa, Artificial Sequence
  Description of Artificial Sequence: Synthetic peptide
  MOD_RES (4)..(4): phosphorylated serine
RRNSSIVGYFFRKNWLRLTW

SEQ ID NO: 7790 - protein, 21 aa, Artificial Sequence
  Description of Artificial Sequence: Synthetic peptide
  MOD_RES (4)..(4): phosphorylated serine
RRNSVFQQGFFFRKNWLRLTW

SEQ ID NO: 7791 - protein, 21 aa, Artificial Sequence
  Description of Artificial Sequence: Synthetic peptide
  MOD_RES (4)..(4): phosphorylated serine
RRNSVFQQGKFFRKNWLRLTW

SEQ ID NO: 7792 - protein, 21 aa, Artificial Sequence
  Description of Artificial Sequence: Synthetic peptide
  MOD_RES (4)..(4): phosphorylated serine
RRNSVFQQGLFFRKNWLRLTW

SEQ ID NO: 7793 - protein, 21 aa, Artificial Sequence
  Description of Artificial Sequence: Synthetic peptide
  MOD_RES (4)..(4): phosphorylated serine
RRNSVFQQGMFFRKNWLRLTW

SEQ ID NO: 7794 - protein, 21 aa, Artificial Sequence
  Description of Artificial Sequence: Synthetic peptide
  MOD_RES (4)..(4): phosphorylated serine
RRNSVFQQGRFFRKNWLRLTW

SEQ ID NO: 7795 - protein, 21 aa, Artificial Sequence
  Description of Artificial Sequence: Synthetic peptide
  MOD_RES (4)..(4): phosphorylated serine
RRNSVFQQGYFFRKNWLRLTW

SEQ ID NO: 7796 - protein, 20 aa, Artificial Sequence
  Description of Artificial Sequence: Synthetic peptide
  MOD_RES (4)..(4): phosphorylated serine
RRPSIAPVLFFRKNWLRLTW

SEQ ID NO: 7797 - protein, 20 aa, Artificial Sequence
  Description of Artificial Sequence: Synthetic peptide
  MOD_RES (4)..(4): phosphorylated serine
RRPSLLSEFFFRKNWLRLTW

SEQ ID NO: 7798 - protein, 20 aa, Artificial Sequence
  Description of Artificial Sequence: Synthetic peptide
  MOD_RES (4)..(4): phosphorylated serine
RRPSLVHGFFFRKNWLRLTW

SEQ ID NO: 7799 - protein, 20 aa, Artificial Sequence
  Description of Artificial Sequence: Synthetic peptide
  MOD_RES (4)..(4): phosphorylated serine
RRPSLVHGKFFRKNWLRLTW

SEQ ID NO: 7800 - protein, 20 aa, Artificial Sequence
  Description of Artificial Sequence: Synthetic peptide
  MOD_RES (4)..(4): phosphorylated serine
RRPSLVHGLFFRKNWLRLTW

SEQ ID NO: 7801 - protein, 20 aa, Artificial Sequence
  Description of Artificial Sequence: Synthetic peptide
  MOD_RES (4)..(4): phosphorylated serine
RRPSLVHGMFFRKNWLRLTW

SEQ ID NO: 7802 - protein, 20 aa, Artificial Sequence
  Description of Artificial Sequence: Synthetic peptide
  MOD_RES (4)..(4): phosphorylated serine
RRPSLVHGRFFRKNWLRLTW

SEQ ID NO: 7803 - protein, 20 aa, Artificial Sequence
  Description of Artificial Sequence: Synthetic peptide
  MOD_RES (4)..(4): phosphorylated serine
RRPSLVHGYFFRKNWLRLTW

SEQ ID NO: 7804 - protein, 20 aa, Artificial Sequence
  Description of Artificial Sequence: Synthetic peptide
  MOD_RES (4)..(4): phosphorylated serine
RRPSVFERFFFRKNWLRLTW

SEQ ID NO: 7805 - protein, 20 aa, Artificial Sequence
  Description of Artificial Sequence: Synthetic peptide
  MOD_RES (4)..(4): phosphorylated serine
RRPSVFERKFFRKNWLRLTW

SEQ ID NO: 7806 - protein, 20 aa, Artificial Sequence
  Description of Artificial Sequence: Synthetic peptide
  MOD_RES (4)..(4): phosphorylated serine
RRPSVFERLFFRKNWLRLTW

SEQ ID NO: 7807 - protein, 20 aa, Artificial Sequence
  Description of Artificial Sequence: Synthetic peptide
  MOD_RES (4)..(4): phosphorylated serine
RRPSVFERMFFRKNWLRLTW

SEQ ID NO: 7808 - protein, 20 aa, Artificial Sequence
  Description of Artificial Sequence: Synthetic peptide
  MOD_RES (4)..(4): phosphorylated serine
RRPSVFERRFFRKNWLRLTW

SEQ ID NO: 7809 - protein, 20 aa, Artificial Sequence
  Description of Artificial Sequence: Synthetic peptide
  MOD_RES (4)..(4): phosphorylated serine
RRPSVFERYFFRKNWLRLTW

SEQ ID NO: 7810 - protein, 20 aa, Artificial Sequence
  Description of Artificial Sequence: Synthetic peptide
  MOD_RES (4)..(4): phosphorylated serine
RRPSYRKIFFFRKNWLRLTW

SEQ ID NO: 7811 - protein, 20 aa, Artificial Sequence
  Description of Artificial Sequence: Synthetic peptide
  MOD_RES (4)..(4): phosphorylated serine
RRPSYRKIKFFRKNWLRLTW

SEQ ID NO: 7812 - protein, 20 aa, Artificial Sequence
  Description of Artificial Sequence: Synthetic peptide
  MOD_RES (4)..(4): phosphorylated serine
RRPSYRKILFFRKNWLRLTW

SEQ ID NO: 7813 - protein, 20 aa, Artificial Sequence
  Description of Artificial Sequence: Synthetic peptide
  MOD_RES (4)..(4): phosphorylated serine
RRPSYRKIMFFRKNWLRLTW

SEQ ID NO: 7814 - protein, 20 aa, Artificial Sequence
  Description of Artificial Sequence: Synthetic peptide
  MOD_RES (4)..(4): phosphorylated serine
RRPSYRKIRFFRKNWLRLTW

SEQ ID NO: 7815 - protein, 20 aa, Artificial Sequence
  Description of Artificial Sequence: Synthetic peptide
  MOD_RES (4)..(4): phosphorylated serine
RRPSYRKIYFFRKNWLRLTW

SEQ ID NO: 7816 - protein, 20 aa, Artificial Sequence
  Description of Artificial Sequence: Synthetic peptide
  MOD_RES (4)..(4): phosphorylated serine
RRPSYTLGFFFRKNWLRLTW

SEQ ID NO: 7817 - protein, 20 aa, Artificial Sequence
  Description of Artificial Sequence: Synthetic peptide
  MOD_RES (4)..(4): phosphorylated serine
RRPSYTLGKFFRKNWLRLTW

SEQ ID NO: 7818 - protein, 20 aa, Artificial Sequence
  Description of Artificial Sequence: Synthetic peptide
  MOD_RES (4)..(4): phosphorylated serine
RRPSYTLGLFFRKNWLRLTW

SEQ ID NO: 7819 - protein, 20 aa, Artificial Sequence
  Description of Artificial Sequence: Synthetic peptide
  MOD_RES (4)..(4): phosphorylated serine
RRPSYTLGMFFRKNWLRLTW

SEQ ID NO: 7820 - protein, 20 aa, Artificial Sequence
  Description of Artificial Sequence: Synthetic peptide
  MOD_RES (4)..(4): phosphorylated serine
RRPSYTLGRFFRKNWLRLTW

SEQ ID NO: 7821 - protein, 20 aa, Artificial Sequence
  Description of Artificial Sequence: Synthetic peptide
  MOD_RES (4)..(4): phosphorylated serine
RRPSYTLGVFFRKNWLRLTW

SEQ ID NO: 7822 - protein, 20 aa, Artificial Sequence
  Description of Artificial Sequence: Synthetic peptide
  MOD_RES (4)..(4): phosphorylated serine
RRPSYTLGYFFRKNWLRLTW

SEQ ID NO: 7823 - protein, 20 aa, Artificial Sequence
  Description of Artificial Sequence: Synthetic peptide
  MOD_RES (4)..(4): phosphorylated serine
RRQSKVEALFFRKNWLRLTW

SEQ ID NO: 7824 - protein, 20 aa, Artificial Sequence
  Description of Artificial Sequence: Synthetic peptide
  MOD_RES (4)..(4): phosphorylated serine
RRRSLERLLFFRKNWLRLTW

SEQ ID NO: 7825 - protein, 19 aa, Artificial Sequence
  Description of Artificial Sequence: Synthetic peptide
  MOD_RES (3)..(3): phosphorylated serine
RRSFLVSYFFRKNWLRLTW

SEQ ID NO: 7826 - protein, 18 aa, Artificial Sequence
  Description of Artificial Sequence: Synthetic peptide
  MOD_RES (5)..(5): phosphorylated serine
RRSFSLEFFRKNWLRLTW

SEQ ID NO: 7827 - protein, 18 aa, Artificial Sequence
  Description of Artificial Sequence: Synthetic peptide
  MOD_RES (4)..(4): phosphorylated serine
RRSSFLQFFRKNWLRLTW

SEQ ID NO: 7828 - protein, 20 aa, Artificial Sequence
  Description of Artificial Sequence: Synthetic peptide
  MOD_RES (3)..(3): phosphorylated serine
  MOD_RES (4)..(4): phosphorylated serine
RRSSFLQLFFFRKNWLRLTW

SEQ ID NO: 7829 - protein, 20 aa, Artificial Sequence
  Description of Artificial Sequence: Synthetic peptide
  MOD_RES (3)..(3): phosphorylated serine
  MOD_RES (4)..(4): phosphorylated serine
RRSSFLQVFFFRKNWLRLTW

SEQ ID NO: 7830 - protein, 20 aa, Artificial Sequence
  Description of Artificial Sequence: Synthetic peptide
  MOD_RES (4)..(4): phosphorylated serine
RRSSFLQVFFFRKNWLRLTW

SEQ ID NO: 7831 - protein, 20 aa, Artificial Sequence
  Description of Artificial Sequence: Synthetic peptide
  MOD_RES (4)..(4): phosphorylated serine
RRSSFLQVKFFRKNWLRLTW

SEQ ID NO: 7832 - protein, 20 aa, Artificial Sequence
  Description of Artificial Sequence: Synthetic peptide
  MOD_RES (4)..(4): phosphorylated serine
RRSSFLQVLFFRKNWLRLTW

SEQ ID NO: 7833 - protein, 20 aa, Artificial Sequence
  Description of Artificial Sequence: Synthetic peptide
  MOD_RES (3)..(3): phosphorylated serine
  MOD_RES (4)..(4): phosphorylated serine
RRSSFLQVMFFRKNWLRLTW

SEQ ID NO: 7834 - protein, 20 aa, Artificial Sequence
  Description of Artificial Sequence: Synthetic peptide
  MOD_RES (4)..(4): phosphorylated serine
RRSSFLQVMFFRKNWLRLTW

SEQ ID NO: 7835 - protein, 20 aa, Artificial Sequence
  Description of Artificial Sequence: Synthetic peptide
  MOD_RES (4)..(4): phosphorylated serine
RRSSFLQVRFFRKNWLRLTW

SEQ ID NO: 7836 - protein, 20 aa, Artificial Sequence
  Description of Artificial Sequence: Synthetic peptide
  MOD_RES (3)..(3): phosphorylated serine
  MOD_RES (4)..(4): phosphorylated serine
RRSSFLQVVFFRKNWLRLTW

SEQ ID NO: 7837 - protein, 20 aa, Artificial Sequence
  Description of Artificial Sequence: Synthetic peptide
  MOD_RES (4)..(4): phosphorylated serine
RRSSFLQVYFFRKNWLRLTW

SEQ ID NO: 7838 - protein, 20 aa, Artificial Sequence
  Description of Artificial Sequence: Synthetic peptide
  MOD_RES (4)..(4): phosphorylated serine
RRSSIGLRFFFRKNWLRLTW

SEQ ID NO: 7839 - protein, 20 aa, Artificial Sequence
  Description of Artificial Sequence: Synthetic peptide
  MOD_RES (4)..(4): phosphorylated serine
RRSSIGLRKFFRKNWLRLTW

SEQ ID NO: 7840 - protein, 20 aa, Artificial Sequence
  Description of Artificial Sequence: Synthetic peptide
  MOD_RES (4)..(4): phosphorylated serine
RRSSIGLRLFFRKNWLRLTW

SEQ ID NO: 7841 - protein, 20 aa, Artificial Sequence
  Description of Artificial Sequence: Synthetic peptide
  MOD_RES (4)..(4): phosphorylated serine
RRSSIGLRMFFRKNWLRLTW

SEQ ID NO: 7842 - protein, 20 aa, Artificial Sequence
  Description of Artificial Sequence: Synthetic peptide
  MOD_RES (4)..(4): phosphorylated serine
RRSSIGLRRFFRKNWLRLTW

SEQ ID NO: 7843 - protein, 20 aa, Artificial Sequence
  Description of Artificial Sequence: Synthetic peptide
  MOD_RES (4)..(4): phosphorylated serine
RRSSIGLRVFFRKNWLRLTW

SEQ ID NO: 7844 - protein, 20 aa, Artificial Sequence
  Description of Artificial Sequence: Synthetic peptide
  MOD_RES (4)..(4): phosphorylated serine
RRSSIGLRYFFRKNWLRLTW

SEQ ID NO: 7845 - protein, 20 aa, Artificial Sequence
  Description of Artificial Sequence: Synthetic peptide
  MOD_RES (3)..(3): phosphorylated serine
RRSSIQSTFFFRKNWLRLTW

SEQ ID NO: 7846 - protein, 20 aa, Artificial Sequence
  Description of Artificial Sequence: Synthetic peptide
  MOD_RES (4)..(4): phosphorylated serine
RRSSIQSTFFFRKNWLRLTW

SEQ ID NO: 7847 - protein, 20 aa, Artificial Sequence
  Description of Artificial Sequence: Synthetic peptide
  MOD_RES (4)..(4): phosphorylated serine
RRSSIQSTKFFRKNWLRLTW

SEQ ID NO: 7848 - protein, 20 aa, Artificial Sequence
  Description of Artificial Sequence: Synthetic peptide
  MOD_RES (4)..(4): phosphorylated serine
RRSSIQSTLFFRKNWLRLTW

SEQ ID NO: 7849 - protein, 20 aa, Artificial Sequence
  Description of Artificial Sequence: Synthetic peptide
  MOD_RES (4)..(4): phosphorylated serine
RRSSIQSTMFFRKNWLRLTW

SEQ ID NO: 7850 - protein, 20 aa, Artificial Sequence
  Description of Artificial Sequence: Synthetic peptide
  MOD_RES (4)..(4): phosphorylated serine
RRSSIQSTRFFRKNWLRLTW

SEQ ID NO: 7851 - protein, 20 aa, Artificial Sequence
  Description of Artificial Sequence: Synthetic peptide
  MOD_RES (4)..(4): phosphorylated serine
RRSSIQSTYFFRKNWLRLTW

SEQ ID NO: 7852 - protein, 23 aa, Artificial Sequence
  Description of Artificial Sequence: Synthetic peptide
  MOD_RES (4)..(4): phosphorylated serine
RRSSLDAEIDSFFFRKNWLRLTW

SEQ ID NO: 7853 - protein, 23 aa, Artificial Sequence
  Description of Artificial Sequence: Synthetic peptide
  MOD_RES (4)..(4): phosphorylated serine
RRSSLDAEIDSLFFRKNWLRLTW

SEQ ID NO: 7854 - protein, 23 aa, Artificial Sequence
  Description of Artificial Sequence: Synthetic peptide
  MOD_RES (4)..(4): phosphorylated serine
RRSSLDAEIDSMFFRKNWLRLTW

SEQ ID NO: 7855 - protein, 23 aa, Artificial Sequence
  Description of Artificial Sequence: Synthetic peptide
  MOD_RES (4)..(4): phosphorylated serine
RRSSLDAEIDSVFFRKNWLRLTW

SEQ ID NO: 7856 - protein, 20 aa, Artificial Sequence
  Description of Artificial Sequence: Synthetic peptide
  MOD_RES (3)..(3): phosphorylated serine
RRSSQSWSFFFRKNWLRLTW

SEQ ID NO: 7857 - protein, 20 aa, Artificial Sequence
  Description of Artificial Sequence: Synthetic peptide
  MOD_RES (4)..(4): phosphorylated serine
RRSSQSWSFFFRKNWLRLTW

SEQ ID NO: 7858 - protein, 20 aa, Artificial Sequence
  Description of Artificial Sequence: Synthetic peptide
  MOD_RES (4)..(4): phosphorylated serine
RRSSQSWSKFFRKNWLRLTW

SEQ ID NO: 7859 - protein, 20 aa, Artificial Sequence
  Description of Artificial Sequence: Synthetic peptide
  MOD_RES (3)..(3): phosphorylated serine
RRSSQSWSLFFRKNWLRLTW

SEQ ID NO: 7860 - protein, 20 aa, Artificial Sequence
  Description of Artificial Sequence: Synthetic peptide
  MOD_RES (4)..(4): phosphorylated serine
RRSSQSWSLFFRKNWLRLTW

SEQ ID NO: 7861 - protein, 20 aa, Artificial Sequence
  Description of Artificial Sequence: Synthetic peptide
  MOD_RES (3)..(3): phosphorylated serine
RRSSQSWSMFFRKNWLRLTW

SEQ ID NO: 7862 - protein, 20 aa, Artificial Sequence
  Description of Artificial Sequence: Synthetic peptide
  MOD_RES (4)..(4): phosphorylated serine
RRSSQSWSMFFRKNWLRLTW

SEQ ID NO: 7863 - protein, 20 aa, Artificial Sequence
  Description of Artificial Sequence: Synthetic peptide
  MOD_RES (4)..(4): phosphorylated serine
RRSSQSWSRFFRKNWLRLTW

SEQ ID NO: 7864 - protein, 20 aa, Artificial Sequence
  Description of Artificial Sequence: Synthetic peptide
  MOD_RES (3)..(3): phosphorylated serine
RRSSQSWSVFFRKNWLRLTW

SEQ ID NO: 7865 - protein, 20 aa, Artificial Sequence
  Description of Artificial Sequence: Synthetic peptide
  MOD_RES (4)..(4): phosphorylated serine
RRSSQSWSYFFRKNWLRLTW

SEQ ID NO: 7866 - protein, 20 aa, Artificial Sequence
  Description of Artificial Sequence: Synthetic peptide
  MOD_RES (4)..(4): phosphorylated serine
RRSSSVAQVFFRKNWLRLTW

SEQ ID NO: 7867 - protein, 22 aa, Artificial Sequence
  Description of Artificial Sequence: Synthetic peptide
  MOD_RES (4)..(4): phosphorylated serine
RRSSTASLVKFFFRKNWLRLTW

SEQ ID NO: 7868 - protein, 22 aa, Artificial Sequence
  Description of Artificial Sequence: Synthetic peptide
  MOD_RES (4)..(4): phosphorylated serine
RRSSTASLVKKFFRKNWLRLTW

SEQ ID NO: 7869 - protein, 22 aa, Artificial Sequence
  Description of Artificial Sequence: Synthetic peptide
  MOD_RES (4)..(4): phosphorylated serine
RRSSTASLVKLFFRKNWLRLTW

SEQ ID NO: 7870 - protein, 22 aa, Artificial Sequence
  Description of Artificial Sequence: Synthetic peptide
  MOD_RES (4)..(4): phosphorylated serine
RRSSTASLVKMFFRKNWLRLTW

SEQ ID NO: 7871 - protein, 22 aa, Artificial Sequence
  Description of Artificial Sequence: Synthetic peptide
  MOD_RES (4)..(4): phosphorylated serine
RRSSTASLVKRFFRKNWLRLTW

SEQ ID NO: 7872 - protein, 20 aa, Artificial Sequence
  Description of Artificial Sequence: Synthetic peptide
  MOD_RES (3)..(3): phosphorylated serine
RRSSVDLGFFFRKNWLRLTW

SEQ ID NO: 7873 - protein, 20 aa, Artificial Sequence
  Description of Artificial Sequence: Synthetic peptide
  MOD_RES (4)..(4): phosphorylated serine
RRSSVDLGFFFRKNWLRLTW

SEQ ID NO: 7874 - protein, 20 aa, Artificial Sequence
  Description of Artificial Sequence: Synthetic peptide
  MOD_RES (3)..(3): phosphorylated serine
RRSSVDLGKFFRKNWLRLTW

SEQ ID NO: 7875 - protein, 20 aa, Artificial Sequence
  Description of Artificial Sequence: Synthetic peptide
  MOD_RES (4)..(4): phosphorylated serine
RRSSVDLGKFFRKNWLRLTW

SEQ ID NO: 7876 - protein, 20 aa, Artificial Sequence
  Description of Artificial Sequence: Synthetic peptide
  MOD_RES (3)..(3): phosphorylated serine
RRSSVDLGLFFRKNWLRLTW

SEQ ID NO: 7877 - protein, 20 aa, Artificial Sequence
  Description of Artificial Sequence: Synthetic peptide
  MOD_RES (4)..(4): phosphorylated serine
RRSSVDLGLFFRKNWLRLTW

SEQ ID NO: 7878 - protein, 20 aa, Artificial Sequence
  Description of Artificial Sequence: Synthetic peptide
  MOD_RES (3)..(3): phosphorylated serine
RRSSVDLGMFFRKNWLRLTW

SEQ ID NO: 7879 - protein, 20 aa, Artificial Sequence
  Description of Artificial Sequence: Synthetic peptide
  MOD_RES (4)..(4): phosphorylated serine
RRSSVDLGMFFRKNWLRLTW

SEQ ID NO: 7880 - protein, 20 aa, Artificial Sequence
  Description of Artificial Sequence: Synthetic peptide
  MOD_RES (3)..(3): phosphorylated serine
RRSSVDLGRFFRKNWLRLTW

SEQ ID NO: 7881 - protein, 20 aa, Artificial Sequence
  Description of Artificial Sequence: Synthetic peptide
  MOD_RES (4)..(4): phosphorylated serine
RRSSVDLGRFFRKNWLRLTW

SEQ ID NO: 7882 - protein, 20 aa, Artificial Sequence
  Description of Artificial Sequence: Synthetic peptide
  MOD_RES (3)..(3): phosphorylated serine
RRSSVDLGYFFRKNWLRLTW

SEQ ID NO: 7883 - protein, 20 aa, Artificial Sequence
  Description of Artificial Sequence: Synthetic peptide
  MOD_RES (4)..(4): phosphorylated serine
RRSSVDLGYFFRKNWLRLTW

SEQ ID NO: 7884 - protein, 20 aa, Artificial Sequence
  Description of Artificial Sequence: Synthetic peptide
  MOD_RES (4)..(4): phosphorylated serine
RRSSVKVEAFFRKNWLRLTW

SEQ ID NO: 7885 - protein, 20 aa, Artificial Sequence
  Description of Artificial Sequence: Synthetic peptide
  MOD_RES (4)..(4): phosphorylated serine
RRSSVKVEFFFRKNWLRLTW

SEQ ID NO: 7886 - protein, 20 aa, Artificial Sequence
  Description of Artificial Sequence: Synthetic peptide
  MOD_RES (4)..(4): phosphorylated serine
RRSSVKVEKFFRKNWLRLTW

SEQ ID NO: 7887 - protein, 20 aa, Artificial Sequence
  Description of Artificial Sequence: Synthetic peptide
  MOD_RES (4)..(4): phosphorylated serine
RRSSVKVELFFRKNWLRLTW

SEQ ID NO: 7888 - protein, 20 aa, Artificial Sequence
  Description of Artificial Sequence: Synthetic peptide
  MOD_RES (4)..(4): phosphorylated serine
RRSSVKVEMFFRKNWLRLTW

SEQ ID NO: 7889 - protein, 20 aa, Artificial Sequence
  Description of Artificial Sequence: Synthetic peptide
  MOD_RES (4)..(4): phosphorylated serine
RRSSVKVERFFRKNWLRLTW

SEQ ID NO: 7890 - protein, 20 aa, Artificial Sequence
  Description of Artificial Sequence: Synthetic peptide
  MOD_RES (4)..(4): phosphorylated serine
RRSSVKVEYFFRKNWLRLTW

SEQ ID NO: 7891 - protein, 20 aa, Artificial Sequence
  Description of Artificial Sequence: Synthetic peptide
  MOD_RES (4)..(4): phosphorylated serine
RRTSPITRFFFRKNWLRLTW

SEQ ID NO: 7892 - protein, 20 aa, Artificial Sequence
  Description of Artificial Sequence: Synthetic peptide
  MOD_RES (4)..(4): phosphorylated serine
RRTSPITRKFFRKNWLRLTW

SEQ ID NO: 7893 - protein, 20 aa, Artificial Sequence
  Description of Artificial Sequence: Synthetic peptide
  MOD_RES (4)..(4): phosphorylated serine
RRTSPITRLFFRKNWLRLTW

SEQ ID NO: 7894 - protein, 20 aa, Artificial Sequence
  Description of Artificial Sequence: Synthetic peptide
  MOD_RES (4)..(4): phosphorylated serine
RRTSPITRMFFRKNWLRLTW

SEQ ID NO: 7895 - protein, 20 aa, Artificial Sequence
  Description of Artificial Sequence: Synthetic peptide
  MOD_RES (4)..(4): phosphorylated serine
RRTSPITRRFFRKNWLRLTW

SEQ ID NO: 7896 - protein, 20 aa, Artificial Sequence
  Description of Artificial Sequence: Synthetic peptide
  MOD_RES (8)..(8): phosphorylated serine
RRVVQRSSFFFRKNWLRLTW

SEQ ID NO: 7897 - protein, 20 aa, Artificial Sequence
  Description of Artificial Sequence: Synthetic peptide
  MOD_RES (8)..(8): phosphorylated serine
RRVVQRSSKFFRKNWLRLTW

SEQ ID NO: 7898 - protein, 20 aa, Artificial Sequence
  Description of Artificial Sequence: Synthetic peptide
  MOD_RES (8)..(8): phosphorylated serine
RRVVQRSSLFFRKNWLRLTW

SEQ ID NO: 7899 - protein, 20 aa, Artificial Sequence
  Description of Artificial Sequence: Synthetic peptide
  MOD_RES (8)..(8): phosphorylated serine
RRVVQRSSMFFRKNWLRLTW

SEQ ID NO: 7900 - protein, 20 aa, Artificial Sequence
  Description of Artificial Sequence: Synthetic peptide
  MOD_RES (8)..(8): phosphorylated serine
RRVVQRSSRFFRKNWLRLTW

SEQ ID NO: 7901 - protein, 20 aa, Artificial Sequence
  Description of Artificial Sequence: Synthetic peptide
  MOD_RES (8)..(8): phosphorylated serine
RRVVQRSSYFFRKNWLRLTW

SEQ ID NO: 7902 - protein, 19 aa, Artificial Sequence
  Description of Artificial Sequence: Synthetic peptide
  MOD_RES (7)..(7): phosphorylated serine
RRWQRSSLFFRKNWLRLTW

SEQ ID NO: 7903 - protein, 20 aa, Artificial Sequence
  Description of Artificial Sequence: Synthetic peptide
  MOD_RES (4)..(4): phosphorylated serine
RRYSGKTEFFFRKNWLRLTW

SEQ ID NO: 7904 - protein, 20 aa, Artificial Sequence
  Description of Artificial Sequence: Synthetic peptide
  MOD_RES (4)..(4): phosphorylated serine
RRYSGKTEKFFRKNWLRLTW

SEQ ID NO: 7905 - protein, 20 aa, Artificial Sequence
  Description of Artificial Sequence: Synthetic peptide
  MOD_RES (4)..(4): phosphorylated serine
RRYSGKTELFFRKNWLRLTW

SEQ ID NO: 7906 - protein, 20 aa, Artificial Sequence
  Description of Artificial Sequence: Synthetic peptide
  MOD_RES (4)..(4): phosphorylated serine
RRYSGKTERFFRKNWLRLTW

SEQ ID NO: 7907 - protein, 20 aa, Artificial Sequence
  Description of Artificial Sequence: Synthetic peptide
  MOD_RES (4)..(4): phosphorylated serine
RRYSGKTEYFFRKNWLRLTW

SEQ ID NO: 7908 - protein, 20 aa, Artificial Sequence
  Description of Artificial Sequence: Synthetic peptide
  MOD_RES (4)..(4): phosphorylated serine
RRYSGNMEFFFRKNWLRLTW

SEQ ID NO: 7909 - protein, 20 aa, Artificial Sequence
  Description of Artificial Sequence: Synthetic peptide
  MOD_RES (4)..(4): phosphorylated serine
RRYSGNMEKFFRKNWLRLTW

SEQ ID NO: 7910 - protein, 20 aa, Artificial Sequence
  Description of Artificial Sequence: Synthetic peptide
  MOD_RES (4)..(4): phosphorylated serine
RRYSGNMELFFRKNWLRLTW

SEQ ID NO: 7911 - protein, 20 aa, Artificial Sequence
  Description of Artificial Sequence: Synthetic peptide
  MOD_RES (4)..(4): phosphorylated serine
RRYSGNMEMFFRKNWLRLTW

SEQ ID NO: 7912 - protein, 20 aa, Artificial Sequence
  Description of Artificial Sequence: Synthetic peptide
  MOD_RES (4)..(4): phosphorylated serine
RRYSGNMERFFRKNWLRLTW

SEQ ID NO: 7913 - protein, 20 aa, Artificial Sequence
  Description of Artificial Sequence: Synthetic peptide
  MOD_RES (4)..(4): phosphorylated serine
RRYSKFFDLFFRKNWLRLTW

SEQ ID NO: 7914 - protein, 20 aa, Artificial Sequence
  Description of Artificial Sequence: Synthetic peptide
  MOD_RES (4)..(4): phosphorylated serine
RRYSPPIERFFRKNWLRLTW

SEQ ID NO: 7915 - protein, 19 aa, Artificial Sequence
  Description of Artificial Sequence: Synthetic peptide
  MOD_RES (4)..(4): phosphorylated serine
RRYSPPIQFFRKNWLRLTW

SEQ ID NO: 7916 - protein, 20 aa, Artificial Sequence
  Description of Artificial Sequence: Synthetic peptide
  MOD_RES (4)..(4): phosphorylated serine
RRYSPPIQFFFRKNWLRLTW

SEQ ID NO: 7917 - protein, 20 aa, Artificial Sequence
  Description of Artificial Sequence: Synthetic peptide
  MOD_RES (4)..(4): phosphorylated serine
RRYSPPIQKFFRKNWLRLTW

SEQ ID NO: 7918 - protein, 20 aa, Artificial Sequence
  Description of Artificial Sequence: Synthetic peptide
  MOD_RES (4)..(4): phosphorylated serine
RRYSPPIQLFFRKNWLRLTW

SEQ ID NO: 7919 - protein, 20 aa, Artificial Sequence
  Description of Artificial Sequence: Synthetic peptide
  MOD_RES (4)..(4): phosphorylated serine
RRYSPPIQMFFRKNWLRLTW

SEQ ID NO: 7920 - protein, 20 aa, Artificial Sequence
  Description of Artificial Sequence: Synthetic peptide
  MOD_RES (4)..(4): phosphorylated serine
RRYSPPIQRFFRKNWLRLTW

SEQ ID NO: 7921 - protein, 20 aa, Artificial Sequence
  Description of Artificial Sequence: Synthetic peptide
  MOD_RES (4)..(4): phosphorylated serine
RRYSPPIQYFFRKNWLRLTW

SEQ ID NO: 7922 - protein, 21 aa, Artificial Sequence
  Description of Artificial Sequence: Synthetic peptide
  MOD_RES (4)..(4): phosphorylated serine
  MOD_RES (6)..(6): phosphorylated serine
RRYSRSPYSFFFRKNWLRLTW

SEQ ID NO: 7923 - protein, 21 aa, Artificial Sequence
  Description of Artificial Sequence: Synthetic peptide
  MOD_RES (4)..(4): phosphorylated serine
RRYSRSPYSFFFRKNWLRLTW

SEQ ID NO: 7924 - protein, 21 aa, Artificial Sequence
  Description of Artificial Sequence: Synthetic peptide
  MOD_RES (6)..(6): phosphorylated serine
RRYSRSPYSFFFRKNWLRLTW

SEQ ID NO: 7925 - protein, 21 aa, Artificial Sequence
  Description of Artificial Sequence: Synthetic peptide
  MOD_RES (4)..(4): phosphorylated serine
  MOD_RES (6)..(6): phosphorylated serine
RRYSRSPYSKFFRKNWLRLTW

SEQ ID NO: 7926 - protein, 21 aa, Artificial Sequence
  Description of Artificial Sequence: Synthetic peptide
  MOD_RES (4)..(4): phosphorylated serine
RRYSRSPYSKFFRKNWLRLTW

SEQ ID NO: 7927 - protein, 21 aa, Artificial Sequence
  Description of Artificial Sequence: Synthetic peptide
  MOD_RES (6)..(6): phosphorylated serine
RRYSRSPYSKFFRKNWLRLTW

SEQ ID NO: 7928 - protein, 21 aa, Artificial Sequence
  Description of Artificial Sequence: Synthetic peptide
  MOD_RES (4)..(4): phosphorylated serine
  MOD_RES (6)..(6): phosphorylated serine
RRYSRSPYSLFFRKNWLRLTW

SEQ ID NO: 7929 - protein, 21 aa, Artificial Sequence
  Description of Artificial Sequence: Synthetic peptide
  MOD_RES (4)..(4): phosphorylated serine
RRYSRSPYSLFFRKNWLRLTW

SEQ ID NO: 7930 - protein, 21 aa, Artificial Sequence
  Description of Artificial Sequence: Synthetic peptide
  MOD_RES (6)..(6): phosphorylated serine
RRYSRSPYSLFFRKNWLRLTW

SEQ ID NO: 7931 - protein, 21 aa, Artificial Sequence
  Description of Artificial Sequence: Synthetic peptide
  MOD_RES (4)..(4): phosphorylated serine
  MOD_RES (6)..(6): phosphorylated serine
RRYSRSPYSMFFRKNWLRLTW

SEQ ID NO: 7932 - protein, 21 aa, Artificial Sequence
  Description of Artificial Sequence: Synthetic peptide
  MOD_RES (4)..(4): phosphorylated serine
RRYSRSPYSMFFRKNWLRLTW

SEQ ID NO: 7933 - protein, 21 aa, Artificial Sequence
  Description of Artificial Sequence: Synthetic peptide
  MOD_RES (6)..(6): phosphorylated serine
RRYSRSPYSMFFRKNWLRLTW

SEQ ID NO: 7934 - protein, 21 aa, Artificial Sequence
  Description of Artificial Sequence: Synthetic peptide
  MOD_RES (4)..(4): phosphorylated serine
  MOD_RES (6)..(6): phosphorylated serine
RRYSRSPYSRFFRKNWLRLTW

SEQ ID NO: 7935 - protein, 21 aa, Artificial Sequence
  Description of Artificial Sequence: Synthetic peptide
  MOD_RES (4)..(4): phosphorylated serine
RRYSRSPYSRFFRKNWLRLTW

SEQ ID NO: 7936 - protein, 21 aa, Artificial Sequence
  Description of Artificial Sequence: Synthetic peptide
  MOD_RES (6)..(6): phosphorylated serine
RRYSRSPYSRFFRKNWLRLTW

SEQ ID NO: 7937 - protein, 21 aa, Artificial Sequence
  Description of Artificial Sequence: Synthetic peptide
  MOD_RES (4)..(4): phosphorylated threonine
RRYTNRVVTKFFRKNWLRLTW

SEQ ID NO: 7938 - protein, 21 aa, Artificial Sequence
  Description of Artificial Sequence: Synthetic peptide
  MOD_RES (4)..(4): phosphorylated threonine
RRYTNRVVTLFFRKNWLRLTW

SEQ ID NO: 7939 - protein, 21 aa, Artificial Sequence
  Description of Artificial Sequence: Synthetic peptide
  MOD_RES (4)..(4): phosphorylated threonine
RRYTNRVVTMFFRKNWLRLTW

SEQ ID NO: 7940 - protein, 21 aa, Artificial Sequence
  Description of Artificial Sequence: Synthetic peptide
  MOD_RES (4)..(4): phosphorylated threonine
RRYTNRVVTRFFRKNWLRLTW

SEQ ID NO: 7941 - protein, 20 aa, Artificial Sequence
  Description of Artificial Sequence: Synthetic peptide
  MOD_RES (4)..(4): phosphorylated serine
RSASFSRKVFFRKNWLRLTW

SEQ ID NO: 7942 - protein, 24 aa, Artificial Sequence
  Description of Artificial Sequence: Synthetic peptide
  MOD_RES (4)..(4): phosphorylated serine
RSASPDDDLGSSNFFRKNWLRLTW

SEQ ID NO: 7943 - protein, 22 aa, Artificial Sequence
  Description of Artificial Sequence: Synthetic peptide
  MOD_RES (4)..(4): phosphorylated serine
RSASSATQVHKFFRKNWLRLTW

SEQ ID NO: 7944 - protein, 22 aa, Artificial Sequence
  Description of Artificial Sequence: Synthetic peptide
  MOD_RES (4)..(4): phosphorylated serine
RSASSATQVHYFFRKNWLRLTW

SEQ ID NO: 7945 - protein, 24 aa, Artificial Sequence
  Description of Artificial Sequence: Synthetic peptide
  MOD_RES (7)..(7): phosphorylated serine
RSDPSKSPGSLRYFFRKNWLRLTW

SEQ ID NO: 7946 - protein, 20 aa, Artificial Sequence
  Description of Artificial Sequence: Synthetic peptide
  MOD_RES (4)..(4): phosphorylated serine
RSDSPKIDLFFRKNWLRLTW

SEQ ID NO: 7947 - protein, 20 aa, Artificial Sequence
  Description of Artificial Sequence: Synthetic peptide
  MOD_RES (4)..(4): phosphorylated serine
RSDSPKIDYFFRKNWLRLTW

SEQ ID NO: 7948 - protein, 20 aa, Artificial Sequence
  Description of Artificial Sequence: Synthetic peptide
  MOD_RES (4)..(4): phosphorylated serine
RSDSRAQAVFFRKNWLRLTW

SEQ ID NO: 7949 - protein, 20 aa, Artificial Sequence
  Description of Artificial Sequence: Synthetic peptide
  MOD_RES (4)..(4): phosphorylated serine
RSDSRAQAYFFRKNWLRLTW

SEQ ID NO: 7950 - protein, 20 aa, Artificial Sequence
  Description of Artificial Sequence: Synthetic peptide
  MOD_RES (4)..(4): phosphorylated serine
RSDSVGENLFFRKNWLRLTW

SEQ ID NO: 7951 - protein, 20 aa, Artificial Sequence
  Description of Artificial Sequence: Synthetic peptide
  MOD_RES (4)..(4): phosphorylated serine
RSDSVGENYFFRKNWLRLTW

SEQ ID NO: 7952 - protein, 19 aa, Artificial Sequence
  Description of Artificial Sequence: Synthetic peptide
  MOD_RES (4)..(4): phosphorylated serine
RSDSYVELFFRKNWLRLTW

SEQ ID NO: 7953 - protein, 22 aa, Artificial Sequence
  Description of Artificial Sequence: Synthetic peptide
  MOD_RES (4)..(4): phosphorylated serine
RSDSYVELSQYFFRKNWLRLTW

SEQ ID NO: 7954 - protein, 24 aa, Artificial Sequence
  Description of Artificial Sequence: Synthetic peptide
  MOD_RES (7)..(7): phosphorylated serine
RSEPSKSPGSLRYFFRKNWLRLTW

SEQ ID NO: 7955 - protein, 20 aa, Artificial Sequence
  Description of Artificial Sequence: Synthetic peptide
  MOD_RES (4)..(4): phosphorylated serine
RSESKDRKFFFRKNWLRLTW

SEQ ID NO: 7956 - protein, 20 aa, Artificial Sequence
  Description of Artificial Sequence: Synthetic peptide
  MOD_RES (4)..(4): phosphorylated serine
RSESKDRKLFFRKNWLRLTW

SEQ ID NO: 7957 - protein, 20 aa, Artificial Sequence
  Description of Artificial Sequence: Synthetic peptide
  MOD_RES (4)..(4): phosphorylated serine
RSESKDRKMFFRKNWLRLTW

SEQ ID NO: 7958 - protein, 20 aa, Artificial Sequence
  Description of Artificial Sequence: Synthetic peptide
  MOD_RES (4)..(4): phosphorylated serine
RSESKDRKVFFRKNWLRLTW

SEQ ID NO: 7959 - protein, 20 aa, Artificial Sequence
  Description of Artificial Sequence: Synthetic peptide
  MOD_RES (4)..(4): phosphorylated serine
RSESPKIDLFFRKNWLRLTW

SEQ ID NO: 7960 - protein, 20 aa, Artificial Sequence
  Description of Artificial Sequence: Synthetic peptide
  MOD_RES (4)..(4): phosphorylated serine
RSESPKIDYFFRKNWLRLTW

SEQ ID NO: 7961 - protein, 20 aa, Artificial Sequence
  Description of Artificial Sequence: Synthetic peptide
  MOD_RES (4)..(4): phosphorylated serine
RSESPPAELFFRKNWLRLTW

SEQ ID NO: 7962 - protein, 20 aa, Artificial Sequence
  Description of Artificial Sequence: Synthetic peptide
  MOD_RES (4)..(4): phosphorylated serine
RSESRAQAVFFRKNWLRLTW

SEQ ID NO: 7963 - protein, 20 aa, Artificial Sequence
  Description of Artificial Sequence: Synthetic peptide
  MOD_RES (4)..(4): phosphorylated serine
RSESRAQAYFFRKNWLRLTW

SEQ ID NO: 7964 - protein, 20 aa, Artificial Sequence
  Description of Artificial Sequence: Synthetic peptide
  MOD_RES (4)..(4): phosphorylated serine
RSESVGENLFFRKNWLRLTW

SEQ ID NO: 7965 - protein, 20 aa, Artificial Sequence
  Description of Artificial Sequence: Synthetic peptide
  MOD_RES (4)..(4): phosphorylated serine
RSESVGENYFFRKNWLRLTW

SEQ ID NO: 7966 - protein, 22 aa, Artificial Sequence
  Description of Artificial Sequence: Synthetic peptide
  MOD_RES (4)..(4): phosphorylated serine
RSESYVELSQYFFRKNWLRLTW

SEQ ID NO: 7967 - protein, 20 aa, Artificial Sequence
  Description of Artificial Sequence: Synthetic peptide
  MOD_RES (4)..(4): phosphorylated serine
RSFSPTMKVFFRKNWLRLTW

SEQ ID NO: 7968 - protein, 20 aa, Artificial Sequence
  Description of Artificial Sequence: Synthetic peptide
  MOD_RES (4)..(4): phosphorylated serine
RSGSLERKFFFRKNWLRLTW

SEQ ID NO: 7969 - protein, 20 aa, Artificial Sequence
  Description of Artificial Sequence: Synthetic peptide
  MOD_RES (4)..(4): phosphorylated serine
RSGSLERKLFFRKNWLRLTW

SEQ ID NO: 7970 - protein, 20 aa, Artificial Sequence
  Description of Artificial Sequence: Synthetic peptide
  MOD_RES (4)..(4): phosphorylated serine
RSGSLERKMFFRKNWLRLTW

SEQ ID NO: 7971 - protein, 20 aa, Artificial Sequence
  Description of Artificial Sequence: Synthetic peptide
  MOD_RES (4)..(4): phosphorylated serine
RSGSLERKVFFRKNWLRLTW

SEQ ID NO: 7972 - protein, 20 aa, Artificial Sequence
  Description of Artificial Sequence: Synthetic peptide
  MOD_RES (5)..(5): phosphorylated serine
RSHSSPASLFFRKNWLRLTW

SEQ ID NO: 7973 - protein, 20 aa, Artificial Sequence
  Description of Artificial Sequence: Synthetic peptide
  MOD_RES (4)..(4): phosphorylated serine
RSISVGENLFFRKNWLRLTW

SEQ ID NO: 7974 - protein, 20 aa, Artificial Sequence
  Description of Artificial Sequence: Synthetic peptide
  MOD_RES (4)..(4): phosphorylated serine
RSLSESYELFFRKNWLRLTW

SEQ ID NO: 7975 - protein, 20 aa, Artificial Sequence
  Description of Artificial Sequence: Synthetic peptide
  MOD_RES (4)..(4): phosphorylated serine
RSLSPGGAAFFRKNWLRLTW

SEQ ID NO: 7976 - protein, 20 aa, Artificial Sequence
  Description of Artificial Sequence: Synthetic peptide
  MOD_RES (4)..(4): phosphorylated serine
RSLSPGGAFFFRKNWLRLTW

SEQ ID NO: 7977 - protein, 20 aa, Artificial Sequence
  Description of Artificial Sequence: Synthetic peptide
  MOD_RES (4)..(4): phosphorylated serine
RSLSPGGALFFRKNWLRLTW

SEQ ID NO: 7978 - protein, 20 aa, Artificial Sequence
  Description of Artificial Sequence: Synthetic peptide
  MOD_RES (4)..(4): phosphorylated serine
RSLSPGGAMFFRKNWLRLTW

SEQ ID NO: 7979 - protein, 20 aa, Artificial Sequence
  Description of Artificial Sequence: Synthetic peptide
  MOD_RES (4)..(4): phosphorylated serine
RSLSPGGAVFFRKNWLRLTW

SEQ ID NO: 7980 - protein, 19 aa, Artificial Sequence
  Description of Artificial Sequence: Synthetic peptide
  MOD_RES (4)..(4): phosphorylated serine
RSLSPLLFFFRKNWLRLTW

SEQ ID NO: 7981 - protein, 19 aa, Artificial Sequence
  Description of Artificial Sequence: Synthetic peptide
  MOD_RES (4)..(4): phosphorylated serine
RSLSPLLLFFRKNWLRLTW

SEQ ID NO: 7982 - protein, 19 aa, Artificial Sequence
  Description of Artificial Sequence: Synthetic peptide
  MOD_RES (4)..(4): phosphorylated serine
RSLSPLLMFFRKNWLRLTW

SEQ ID NO: 7983 - protein, 19 aa, Artificial Sequence
  Description of Artificial Sequence: Synthetic peptide
  MOD_RES (4)..(4): phosphorylated serine
RSLSPLLVFFRKNWLRLTW

SEQ ID NO: 7984 - protein, 21 aa, Artificial Sequence
  Description of Artificial Sequence: Synthetic peptide
  MOD_RES (4)..(4): phosphorylated serine
RSLSQELVGVFFRKNWLRLTW

SEQ ID NO: 7985 - protein, 20 aa, Artificial Sequence
  Description of Artificial Sequence: Synthetic peptide
  MOD_RES (4)..(4): phosphorylated serine
RSLSVEIVKFFRKNWLRLTW

SEQ ID NO: 7986 - protein, 20 aa, Artificial Sequence
  Description of Artificial Sequence: Synthetic peptide
  MOD_RES (4)..(4): phosphorylated serine
RSLSVEIVYFFRKNWLRLTW

SEQ ID NO: 7987 - protein, 20 aa, Artificial Sequence
  Description of Artificial Sequence: Synthetic peptide
  MOD_RES (4)..(4): phosphorylated serine
RSMSMPVAHFFRKNWLRLTW

SEQ ID NO: 7988 - protein, 20 aa, Artificial Sequence
  Description of Artificial Sequence: Synthetic peptide
  MOD_RES (4)..(4): phosphorylated serine
RSMSMPVAKFFRKNWLRLTW

SEQ ID NO: 7989 - protein, 29 aa, Artificial Sequence
  Description of Artificial Sequence: Synthetic peptide
  MOD_RES (2)..(2): phosphorylated serine
RSPEDEYELLMPHRISSHFFRKNWLRLTW

SEQ ID NO: 7990 - protein, 20 aa, Artificial Sequence
  Description of Artificial Sequence: Synthetic peptide
  MOD_RES (5)..(5): phosphorylated serine
RSRRSPLLKFFRKNWLRLTW

SEQ ID NO: 7991 - protein, 20 aa, Artificial Sequence
  Description of Artificial Sequence: Synthetic peptide
  MOD_RES (5)..(5): phosphorylated serine
RSRRSPLLYFFRKNWLRLTW

SEQ ID NO: 7992 - protein, 19 aa, Artificial Sequence
  Description of Artificial Sequence: Synthetic peptide
  MOD_RES (4)..(4): phosphorylated serine
RSRSPLELFFRKNWLRLTW

SEQ ID NO: 7993 - protein, 21 aa, Artificial Sequence
  Description of Artificial Sequence: Synthetic peptide
  MOD_RES (4)..(4): phosphorylated serine
RSRSPPPVSKFFRKNWLRLTW

SEQ ID NO: 7994 - protein, 21 aa, Artificial Sequence
  Description of Artificial Sequence: Synthetic peptide
  MOD_RES (4)..(4): phosphorylated serine
RSRSPPPVSYFFRKNWLRLTW

SEQ ID NO: 7995 - protein, 20 aa, Artificial Sequence
  Description of Artificial Sequence: Synthetic peptide
  MOD_RES (4)..(4): phosphorylated serine
RSRSPRPAFFFRKNWLRLTW

SEQ ID NO: 7996 - protein, 20 aa, Artificial Sequence
  Description of Artificial Sequence: Synthetic peptide
  MOD_RES (4)..(4): phosphorylated serine
RSRSPRPAIFFRKNWLRLTW

SEQ ID NO: 7997 - protein, 20 aa, Artificial Sequence
  Description of Artificial Sequence: Synthetic peptide
  MOD_RES (4)..(4): phosphorylated serine
RSRSPRPALFFRKNWLRLTW

SEQ ID NO: 7998 - protein, 20 aa, Artificial Sequence
  Description of Artificial Sequence: Synthetic peptide
  MOD_RES (4)..(4): phosphorylated serine
RSRSPRPAMFFRKNWLRLTW

SEQ ID NO: 7999 - protein, 20 aa, Artificial Sequence
  Description of Artificial Sequence: Synthetic peptide
  MOD_RES (4)..(4): phosphorylated serine
RSRSPRPAVFFRKNWLRLTW

SEQ ID NO: 8000 - protein, 20 aa, Artificial Sequence
  Description of Artificial Sequence: Synthetic peptide
  MOD_RES (4)..(4): phosphorylated serine
  MOD_RES (9)..(9): Any amino acid
RSRSPRPAXFFRKNWLRLTW

SEQ ID NO: 8001 - protein, 21 aa, Artificial Sequence
  Description of Artificial Sequence: Synthetic peptide
  MOD_RES (5)..(5): phosphorylated serine
RSRTSPITRRFFRKNWLRLTW

SEQ ID NO: 8002 - protein, 21 aa, Artificial Sequence
  Description of Artificial Sequence: Synthetic peptide
  MOD_RES (5)..(5): phosphorylated serine
RSRTSPITRYFFRKNWLRLTW

SEQ ID NO: 8003 - protein, 20 aa, Artificial Sequence
  Description of Artificial Sequence: Synthetic peptide
  MOD_RES (4)..(4): phosphorylated serine
RSSSLIRHKFFRKNWLRLTW

SEQ ID NO: 8004 - protein, 20 aa, Artificial Sequence
  Description of Artificial Sequence: Synthetic peptide
  MOD_RES (4)..(4): phosphorylated serine
RSSSLIRHYFFRKNWLRLTW

SEQ ID NO: 8005 - protein, 20 aa, Artificial Sequence
  Description of Artificial Sequence: Synthetic peptide
  MOD_RES (4)..(4): phosphorylated serine
RSVSLSMRKFFRKNWLRLTW

SEQ ID NO: 8006 - protein, 20 aa, Artificial Sequence
  Description of Artificial Sequence: Synthetic peptide
  MOD_RES (4)..(4): phosphorylated serine
RSVSLSMRYFFRKNWLRLTW

SEQ ID NO: 8007 - protein, 25 aa, Artificial Sequence
  Description of Artificial Sequence: Synthetic peptide
  MOD_RES (2)..(2): phosphorylated serine
RSWKYNQSISLRRPFFRKNWLRLTW

SEQ ID NO: 8008 - protein, 20 aa, Artificial Sequence
  Description of Artificial Sequence: Synthetic peptide
  MOD_RES (4)..(4): phosphorylated serine
  MOD_RES (8)..(8): phosphorylated serine
RSYSGSRSKFFRKNWLRLTW

SEQ ID NO: 8009 - protein, 20 aa, Artificial Sequence
  Description of Artificial Sequence: Synthetic peptide
  MOD_RES (4)..(4): phosphorylated serine
  MOD_RES (8)..(8): phosphorylated serine
RSYSGSRSRFFRKNWLRLTW

SEQ ID NO: 8010 - protein, 20 aa, Artificial Sequence
  Description of Artificial Sequence: Synthetic peptide
  MOD_RES (4)..(4): phosphorylated serine
  MOD_RES (8)..(8): phosphorylated serine
RSYSGSRSYFFRKNWLRLTW

SEQ ID NO: 8011 - protein, 21 aa, Artificial Sequence
  Description of Artificial Sequence: Synthetic peptide
  MOD_RES (4)..(4): phosphorylated serine
RSYSPDHRQKFFRKNWLRLTW

SEQ ID NO: 8012 - protein, 21 aa, Artificial Sequence
  Description of Artificial Sequence: Synthetic peptide
  MOD_RES (4)..(4): phosphorylated serine
RSYSPDHRQYFFRKNWLRLTW

SEQ ID NO: 8013 - protein, 20 aa, Artificial Sequence
  Description of Artificial Sequence: Synthetic peptide
  MOD_RES (4)..(4): phosphorylated serine
RSYSPERSKFFRKNWLRLTW

SEQ ID NO: 8014 - protein, 20 aa, Artificial Sequence
  Description of Artificial Sequence: Synthetic peptide
  MOD_RES (4)..(4): phosphorylated serine
RSYSPERSYFFRKNWLRLTW

SEQ ID NO: 8015 - protein, 20 aa, Artificial Sequence
  Description of Artificial Sequence: Synthetic peptide
  MOD_RES (4)..(4): phosphorylated serine
RSYSPRNSRFFRKNWLRLTW

SEQ ID NO: 8016 - protein, 20 aa, Artificial Sequence
  Description of Artificial Sequence: Synthetic peptide
  MOD_RES (4)..(4): phosphorylated serine
RSYSPRNSYFFRKNWLRLTW

SEQ ID NO: 8017 - protein, 20 aa, Artificial Sequence
  Description of Artificial Sequence: Synthetic peptide
  MOD_RES (6)..(6): phosphorylated serine
RSYSRSFSKFFRKNWLRLTW

SEQ ID NO: 8018 - protein, 20 aa, Artificial Sequence
  Description of Artificial Sequence: Synthetic peptide
  MOD_RES (4)..(4): phosphorylated serine
RSYSRSFSRFFRKNWLRLTW

SEQ ID NO: 8019 - protein, 20 aa, Artificial Sequence
  Description of Artificial Sequence: Synthetic peptide
  MOD_RES (6)..(6): phosphorylated serine
RSYSRSFSRFFRKNWLRLTW

SEQ ID NO: 8020 - protein, 20 aa, Artificial Sequence
  Description of Artificial Sequence: Synthetic peptide
  MOD_RES (6)..(6): phosphorylated serine
RSYSRSFSYFFRKNWLRLTW

SEQ ID NO: 8021 - protein, 20 aa, Artificial Sequence
  Description of Artificial Sequence: Synthetic peptide
  MOD_RES (4)..(4): phosphorylated serine
RSYSYPRQKFFRKNWLRLTW

SEQ ID NO: 8022 - protein, 20 aa, Artificial Sequence
  Description of Artificial Sequence: Synthetic peptide
  MOD_RES (4)..(4): phosphorylated serine
RSYSYPRQYFFRKNWLRLTW

SEQ ID NO: 8023 - protein, 25 aa, Artificial Sequence
  Description of Artificial Sequence: Synthetic peptide
  MOD_RES (12)..(12): phosphorylated serine
RSYVTTSTRTYSLGFFRKNWLRLTW

SEQ ID NO: 8024 - protein, 20 aa, Artificial Sequence
  Description of Artificial Sequence: Synthetic peptide
  MOD_RES (4)..(4): phosphorylated serine
RTASFAVRKFFRKNWLRLTW

SEQ ID NO: 8025 - protein, 20 aa, Artificial Sequence
  Description of Artificial Sequence: Synthetic peptide
  MOD_RES (4)..(4): phosphorylated serine
RTASFAVRYFFRKNWLRLTW

SEQ ID NO: 8026 - protein, 20 aa, Artificial Sequence
  Description of Artificial Sequence: Synthetic peptide
  MOD_RES (4)..(4): phosphorylated serine
RTASLIIKVFFRKNWLRLTW

SEQ ID NO: 8027 - protein, 21 aa, Artificial Sequence
  Description of Artificial Sequence: Synthetic peptide
  MOD_RES (4)..(4): phosphorylated serine
RTASPPPPPKFFRKNWLRLTW

SEQ ID NO: 8028 - protein, 24 aa, Artificial Sequence
  Description of Artificial Sequence: Synthetic peptide
  MOD_RES (7)..(7): phosphorylated serine
RTDPSKSPGSLRYFFRKNWLRLTW

SEQ ID NO: 8029 - protein, 20 aa, Artificial Sequence
  Description of Artificial Sequence: Synthetic peptide
  MOD_RES (4)..(4): phosphorylated serine
RTDSPKIDLFFRKNWLRLTW

SEQ ID NO: 8030 - protein, 20 aa, Artificial Sequence
  Description of Artificial Sequence: Synthetic peptide
  MOD_RES (4)..(4): phosphorylated serine
RTDSPKIDYFFRKNWLRLTW

SEQ ID NO: 8031 - protein, 20 aa, Artificial Sequence
  Description of Artificial Sequence: Synthetic peptide
  MOD_RES (4)..(4): phosphorylated serine
RTDSRAQAVFFRKNWLRLTW

SEQ ID NO: 8032 - protein, 20 aa, Artificial Sequence
  Description of Artificial Sequence: Synthetic peptide
  MOD_RES (4)..(4): phosphorylated serine
RTDSRAQAYFFRKNWLRLTW

SEQ ID NO: 8033 - protein, 22 aa, Artificial Sequence
  Description of Artificial Sequence: Synthetic peptide
  MOD_RES (4)..(4): phosphorylated serine
RTDSYVELSQYFFRKNWLRLTW

SEQ ID NO: 8034 - protein, 24 aa, Artificial Sequence
  Description of Artificial Sequence: Synthetic peptide
  MOD_RES (7)..(7): phosphorylated serine
RTEPSKSPGSLRYFFRKNWLRLTW

SEQ ID NO: 8035 - protein, 21 aa, Artificial Sequence
  Description of Artificial Sequence: Synthetic peptide
  MOD_RES (4)..(4): phosphorylated serine
RTESDSGLKFFFRKNWLRLTW

SEQ ID NO: 8036 - protein, 21 aa, Artificial Sequence
  Description of Artificial Sequence: Synthetic peptide
  MOD_RES (4)..(4): phosphorylated serine
RTESDSGLKKFFRKNWLRLTW

SEQ ID NO: 8037 - protein, 21 aa, Artificial Sequence
  Description of Artificial Sequence: Synthetic peptide
  MOD_RES (4)..(4): phosphorylated serine
RTESDSGLKLFFRKNWLRLTW

SEQ ID NO: 8038 - protein, 21 aa, Artificial Sequence
  Description of Artificial Sequence: Synthetic peptide
  MOD_RES (4)..(4): phosphorylated serine
RTESDSGLKMFFRKNWLRLTW

SEQ ID NO: 8039 - protein, 21 aa, Artificial Sequence
  Description of Artificial Sequence: Synthetic peptide
  MOD_RES (4)..(4): phosphorylated serine
RTESDSGLKVFFRKNWLRLTW

SEQ ID NO: 8040 - protein, 20 aa, Artificial Sequence
  Description of Artificial Sequence: Synthetic peptide
  MOD_RES (4)..(4): phosphorylated serine
RTESPKIDLFFRKNWLRLTW

SEQ ID NO: 8041 - protein, 20 aa, Artificial Sequence
  Description of Artificial Sequence: Synthetic peptide
  MOD_RES (4)..(4): phosphorylated serine
RTESPKIDYFFRKNWLRLTW

SEQ ID NO: 8042 - protein, 20 aa, Artificial Sequence
  Description of Artificial Sequence: Synthetic peptide
  MOD_RES (4)..(4): phosphorylated serine
RTESRAQAVFFRKNWLRLTW

SEQ ID NO: 8043 - protein, 20 aa, Artificial Sequence
  Description of Artificial Sequence: Synthetic peptide
  MOD_RES (4)..(4): phosphorylated serine
RTESRAQAYFFRKNWLRLTW

SEQ ID NO: 8044 - protein, 22 aa, Artificial Sequence
  Description of Artificial Sequence: Synthetic peptide
  MOD_RES (4)..(4): phosphorylated serine
RTESYVELSQYFFRKNWLRLTW

SEQ ID NO: 8045 - protein, 20 aa, Artificial Sequence
  Description of Artificial Sequence: Synthetic peptide
  MOD_RES (4)..(4): phosphorylated serine
RTFSLDTILFFRKNWLRLTW

SEQ ID NO: 8046 - protein, 20 aa, Artificial Sequence
  Description of Artificial Sequence: Synthetic peptide
  MOD_RES (4)..(4): phosphorylated serine
RTFSPTYGFFFRKNWLRLTW

SEQ ID NO: 8047 - protein, 20 aa, Artificial Sequence
  Description of Artificial Sequence: Synthetic peptide
  MOD_RES (4)..(4): phosphorylated serine
RTFSPTYGLFFRKNWLRLTW

SEQ ID NO: 8048 - protein, 20 aa, Artificial Sequence
  Description of Artificial Sequence: Synthetic peptide
  MOD_RES (4)..(4): phosphorylated serine
RTFSPTYGMFFRKNWLRLTW

SEQ ID NO: 8049 - protein, 20 aa, Artificial Sequence
  Description of Artificial Sequence: Synthetic peptide
  MOD_RES (4)..(4): phosphorylated serine
RTFSPTYGVFFRKNWLRLTW

SEQ ID NO: 8050 - protein, 20 aa, Artificial Sequence
  Description of Artificial Sequence: Synthetic peptide
  MOD_RES (4)..(4): phosphorylated serine
RTHSLLLLLFFRKNWLRLTW

SEQ ID NO: 8051 - protein, 20 aa, Artificial Sequence
  Description of Artificial Sequence: Synthetic peptide
  MOD_RES (4)..(4): phosphorylated serine
RTLSHISEAFFRKNWLRLTW

SEQ ID NO: 8052 - protein, 20 aa, Artificial Sequence
  Description of Artificial Sequence: Synthetic peptide
  MOD_RES (4)..(4): phosphorylated serine
RTLSHISEVFFRKNWLRLTW

SEQ ID NO: 8053 - protein, 21 aa, Artificial Sequence
  Description of Artificial Sequence: Synthetic peptide
  MOD_RES (4)..(4): phosphorylated serine
RTLSPEIITVFFRKNWLRLTW

SEQ ID NO: 8054 - protein, 22 aa, Artificial Sequence
  Description of Artificial Sequence: Synthetic peptide
  MOD_RES (4)..(4): phosphorylated serine
RTMSEAALVRKFFRKNWLRLTW

SEQ ID NO: 8055 - protein, 20 aa, Artificial Sequence
  Description of Artificial Sequence: Synthetic peptide
  MOD_RES (4)..(4): phosphorylated serine
RTNSPGFQKFFRKNWLRLTW

SEQ ID NO: 8056 - protein, 20 aa, Artificial Sequence
  Description of Artificial Sequence: Synthetic peptide
  MOD_RES (4)..(4): phosphorylated serine
RTPSDVKELFFRKNWLRLTW

SEQ ID NO: 8057 - protein, 21 aa, Artificial Sequence
  Description of Artificial Sequence: Synthetic peptide
  MOD_RES (4)..(4): phosphorylated serine
RTPSFLKKNKFFRKNWLRLTW

SEQ ID NO: 8058 - protein, 21 aa, Artificial Sequence
  Description of Artificial Sequence: Synthetic peptide
  MOD_RES (4)..(4): phosphorylated serine
RTPSFLKKNYFFRKNWLRLTW

SEQ ID NO: 8059 - protein, 22 aa, Artificial Sequence
  Description of Artificial Sequence: Synthetic peptide
  MOD_RES (4)..(4): phosphorylated serine
RTRSLSSLREKFFRKNWLRLTW

SEQ ID NO: 8060 - protein, 22 aa, Artificial Sequence
  Description of Artificial Sequence: Synthetic peptide
  MOD_RES (4)..(4): phosphorylated serine
RTRSLSSLREYFFRKNWLRLTW

SEQ ID NO: 8061 - protein, 20 aa, Artificial Sequence
  Description of Artificial Sequence: Synthetic peptide
  MOD_RES (4)..(4): phosphorylated serine
RTRSPSPTFFFRKNWLRLTW

SEQ ID NO: 8062 - protein, 20 aa, Artificial Sequence
  Description of Artificial Sequence: Synthetic peptide
  MOD_RES (4)..(4): phosphorylated serine
RTRSPSPTLFFRKNWLRLTW

SEQ ID NO: 8063 - protein, 20 aa, Artificial Sequence
  Description of Artificial Sequence: Synthetic peptide
  MOD_RES (4)..(4): phosphorylated serine
RTRSPSPTMFFRKNWLRLTW

SEQ ID NO: 8064 - protein, 20 aa, Artificial Sequence
  Description of Artificial Sequence: Synthetic peptide
  MOD_RES (4)..(4): phosphorylated serine
RTRSPSPTVFFRKNWLRLTW

SEQ ID NO: 8065 - protein, 20 aa, Artificial Sequence
  Description of Artificial Sequence: Synthetic peptide
  MOD_RES (4)..(4): phosphorylated serine
RTSSFALNLFFRKNWLRLTW

SEQ ID NO: 8066 - protein, 20 aa, Artificial Sequence
  Description of Artificial Sequence: Synthetic peptide
  MOD_RES (4)..(4): phosphorylated serine
RTSSFTEQLFFRKNWLRLTW

SEQ ID NO: 8067 - protein, 20 aa, Artificial Sequence
  Description of Artificial Sequence: Synthetic peptide
  MOD_RES (4)..(4): phosphorylated serine
RTSSFTFQNFFRKNWLRLTW

SEQ ID NO: 8068 - protein, 20 aa, Artificial Sequence
  Description of Artificial Sequence: Synthetic peptide
  MOD_RES (6)..(6): phosphorylated threonine
RTSSFTFQNFFRKNWLRLTW

SEQ ID NO: 8069 - protein, 20 aa, Artificial Sequence
  Description of Artificial Sequence: Synthetic peptide
  MOD_RES (4)..(4): phosphorylated serine
RTSSPLFNKFFRKNWLRLTW

SEQ ID NO: 8070 - protein, 20 aa, Artificial Sequence
  Description of Artificial Sequence: Synthetic peptide
  MOD_RES (5)..(5): phosphorylated serine
RTYKSPLRHFFRKNWLRLTW

SEQ ID NO: 8071 - protein, 20 aa, Artificial Sequence
  Description of Artificial Sequence: Synthetic peptide
  MOD_RES (5)..(5): phosphorylated serine
RTYKSPLRKFFRKNWLRLTW

SEQ ID NO: 8072 - protein, 20 aa, Artificial Sequence
  Description of Artificial Sequence: Synthetic peptide
  MOD_RES (5)..(5): phosphorylated serine
RTYKSPLRYFFRKNWLRLTW

SEQ ID NO: 8073 - protein, 20 aa, Artificial Sequence
  Description of Artificial Sequence: Synthetic peptide
  MOD_RES (4)..(4): phosphorylated serine
RTYSGPMNKFFRKNWLRLTW

SEQ ID NO: 8074 - protein, 21 aa, Artificial Sequence
  Description of Artificial Sequence: Synthetic peptide
  MOD_RES (4)..(4): phosphorylated serine
RTYSGPMNKVFFRKNWLRLTW

SEQ ID NO: 8075 - protein, 20 aa, Artificial Sequence
  Description of Artificial Sequence: Synthetic peptide
  MOD_RES (4)..(4): phosphorylated serine
RTYSHGTYRFFRKNWLRLTW

SEQ ID NO: 8076 - protein, 20 aa, Artificial Sequence
  Description of Artificial Sequence: Synthetic peptide
  MOD_RES (4)..(4): phosphorylated serine
RVASFAVRKFFRKNWLRLTW

SEQ ID NO: 8077 - protein, 20 aa, Artificial Sequence
  Description of Artificial Sequence: Synthetic peptide
  MOD_RES (4)..(4): phosphorylated serine
RVASFAVRYFFRKNWLRLTW

SEQ ID NO: 8078 - protein, 20 aa, Artificial Sequence
  Description of Artificial Sequence: Synthetic peptide
  MOD_RES (4)..(4): phosphorylated serine
RVASPLVHKFFRKNWLRLTW

SEQ ID NO: 8079 - protein, 20 aa, Artificial Sequence
  Description of Artificial Sequence: Synthetic peptide
  MOD_RES (4)..(4): phosphorylated serine
RVASPLVHYFFRKNWLRLTW

SEQ ID NO: 8080 - protein, 21 aa, Artificial Sequence
  Description of Artificial Sequence: Synthetic peptide
  MOD_RES (4)..(4): phosphorylated serine
RVASPPPPPKFFRKNWLRLTW

SEQ ID NO: 8081 - protein, 21 aa, Artificial Sequence
  Description of Artificial Sequence: Synthetic peptide
  MOD_RES (4)..(4): phosphorylated serine
RVASPPPPPYFFRKNWLRLTW

SEQ ID NO: 8082 - protein, 20 aa, Artificial Sequence
  Description of Artificial Sequence: Synthetic peptide
  MOD_RES (4)..(4): phosphorylated serine
RVASPTSGVFFRKNWLRLTW

SEQ ID NO: 8083 - protein, 21 aa, Artificial Sequence
  Description of Artificial Sequence: Synthetic peptide
  MOD_RES (4)..(4): phosphorylated serine
RVASPTSGVKFFRKNWLRLTW

SEQ ID NO: 8084 - protein, 22 aa, Artificial Sequence
  Description of Artificial Sequence: Synthetic peptide
  MOD_RES (4)..(4): phosphorylated serine
RVASPTSGVKKFFRKNWLRLTW

SEQ ID NO: 8085 - protein, 22 aa, Artificial Sequence
  Description of Artificial Sequence: Synthetic peptide
  MOD_RES (4)..(4): phosphorylated serine
RVASPTSGVKRFFRKNWLRLTW

SEQ ID NO: 8086 - protein, 21 aa, Artificial Sequence
  Description of Artificial Sequence: Synthetic peptide
  MOD_RES (4)..(4): phosphorylated serine
RVASPTSGVYFFRKNWLRLTW

SEQ ID NO: 8087 - protein, 20 aa, Artificial Sequence
  Description of Artificial Sequence: Synthetic peptide
  MOD_RES (4)..(4): phosphorylated serine
RVDSPSHGLFFRKNWLRLTW

SEQ ID NO: 8088 - protein, 20 aa, Artificial Sequence
  Description of Artificial Sequence: Synthetic peptide
  MOD_RES (4)..(4): phosphorylated serine
RVGSLVLNLFFRKNWLRLTW

SEQ ID NO: 8089 - protein, 20 aa, Artificial Sequence
  Description of Artificial Sequence: Synthetic peptide
  MOD_RES (4)..(4): phosphorylated serine
RVISGVLQLFFRKNWLRLTW

SEQ ID NO: 8090 - protein, 21 aa, Artificial Sequence
  Description of Artificial Sequence: Synthetic peptide
  MOD_RES (6)..(6): phosphorylated serine
RVKLPSGSKKFFRKNWLRLTW

SEQ ID NO: 8091 - protein, 22 aa, Artificial Sequence
  Description of Artificial Sequence: Synthetic peptide
  MOD_RES (4)..(4): phosphorylated serine
  MOD_RES (7)..(7): phosphorylated serine
RVKSPGSGHVKFFRKNWLRLTW

SEQ ID NO: 8092 - protein, 22 aa, Artificial Sequence
  Description of Artificial Sequence: Synthetic peptide
  MOD_RES (4)..(4): phosphorylated serine
  MOD_RES (7)..(7): phosphorylated serine
RVKSPGSGHVYFFRKNWLRLTW

SEQ ID NO: 8093 - protein, 20 aa, Artificial Sequence
  Description of Artificial Sequence: Synthetic peptide
  MOD_RES (4)..(4): phosphorylated serine
RVKSPISLKFFRKNWLRLTW

SEQ ID NO: 8094 - protein, 22 aa, Artificial Sequence
  Description of Artificial Sequence: Synthetic peptide
  MOD_RES (4)..(4): phosphorylated serine
RVKSPSPKSERFFRKNWLRLTW

SEQ ID NO: 8095 - protein, 22 aa, Artificial Sequence
  Description of Artificial Sequence: Synthetic peptide
  MOD_RES (4)..(4): phosphorylated serine
RVKSPSPKSEYFFRKNWLRLTW

SEQ ID NO: 8096 - protein, 22 aa, Artificial Sequence
  Description of Artificial Sequence: Synthetic peptide
  MOD_RES (4)..(4): phosphorylated threonine
RVKTPTSQSYKFFRKNWLRLTW

SEQ ID NO: 8097 - protein, 22 aa, Artificial Sequence
  Description of Artificial Sequence: Synthetic peptide
  MOD_RES (4)..(4): phosphorylated threonine
RVKTPTSQSYRFFRKNWLRLTW

SEQ ID NO: 8098 - protein, 22 aa, Artificial Sequence
  Description of Artificial Sequence: Synthetic peptide
  MOD_RES (4)..(4): phosphorylated threonine
RVKTPTSQSYYFFRKNWLRLTW

SEQ ID NO: 8099 - protein, 20 aa, Artificial Sequence
  Description of Artificial Sequence: Synthetic peptide
  MOD_RES (5)..(5): phosphorylated threonine
RVKTTPLRRFFRKNWLRLTW

SEQ ID NO: 8100 - protein, 20 aa, Artificial Sequence
  Description of Artificial Sequence: Synthetic peptide
  MOD_RES (5)..(5): phosphorylated threonine
RVKTTPLRYFFRKNWLRLTW

SEQ ID NO: 8101 - protein, 23 aa, Artificial Sequence
  Description of Artificial Sequence: Synthetic peptide
  MOD_RES (8)..(8): phosphorylated serine
RVLDRSPSRSAKFFRKNWLRLTW

SEQ ID NO: 8102 - protein, 23 aa, Artificial Sequence
  Description of Artificial Sequence: Synthetic peptide
  MOD_RES (8)..(8): phosphorylated serine
RVLDRSPSRSAYFFRKNWLRLTW

SEQ ID NO: 8103 - protein, 20 aa, Artificial Sequence
  Description of Artificial Sequence: Synthetic peptide
  MOD_RES (5)..(5): phosphorylated serine
RVLHSPPAVFFRKNWLRLTW

SEQ ID NO: 8104 - protein, 20 aa, Artificial Sequence
  Description of Artificial Sequence: Synthetic peptide
  MOD_RES (4)..(4): phosphorylated serine
RVLSGVVTKFFRKNWLRLTW

SEQ ID NO: 8105 - protein, 20 aa, Artificial Sequence
  Description of Artificial Sequence: Synthetic peptide
  MOD_RES (4)..(4): phosphorylated serine
RVLSPLIIKFFRKNWLRLTW

SEQ ID NO: 8106 - protein, 20 aa, Artificial Sequence
  Description of Artificial Sequence: Synthetic peptide
  MOD_RES (4)..(4): phosphorylated serine
RVPSLLVLLFFRKNWLRLTW

SEQ ID NO: 8107 - protein, 20 aa, Artificial Sequence
  Description of Artificial Sequence: Synthetic peptide
  MOD_RES (4)..(4): phosphorylated serine
RVPSSTLKKFFRKNWLRLTW

SEQ ID NO: 8108 - protein, 20 aa, Artificial Sequence
  Description of Artificial Sequence: Synthetic peptide
  MOD_RES (4)..(4): phosphorylated serine
RVPSSTLKYFFRKNWLRLTW

SEQ ID NO: 8109 - protein, 21 aa, Artificial Sequence
  Description of Artificial Sequence: Synthetic peptide
  MOD_RES (7)..(7): phosphorylated serine
RVRKLPSTTLFFRKNWLRLTW

SEQ ID NO: 8110 - protein, 21 aa, Artificial Sequence
  Description of Artificial Sequence: Synthetic peptide
  MOD_RES (5)..(5): phosphorylated serine
RVRQSPLATKFFRKNWLRLTW

SEQ ID NO: 8111 - protein, 21 aa, Artificial Sequence
  Description of Artificial Sequence: Synthetic peptide
  MOD_RES (5)..(5): phosphorylated serine
RVRQSPLATRFFRKNWLRLTW

SEQ ID NO: 8112 - protein, 21 aa, Artificial Sequence
  Description of Artificial Sequence: Synthetic peptide
  MOD_RES (5)..(5): phosphorylated serine
RVRQSPLATYFFRKNWLRLTW

SEQ ID NO: 8113 - protein, 22 aa, Artificial Sequence
  Description of Artificial Sequence: Synthetic peptide
  MOD_RES (5)..(5): phosphorylated serine
RVRRSSFLNAKFFRKNWLRLTW

SEQ ID NO: 8114 - protein, 22 aa, Artificial Sequence
  Description of Artificial Sequence: Synthetic peptide
  MOD_RES (4)..(4): phosphorylated serine
RVRSLSSLREKFFRKNWLRLTW

SEQ ID NO: 8115 - protein, 22 aa, Artificial Sequence
  Description of Artificial Sequence: Synthetic peptide
  MOD_RES (4)..(4): phosphorylated serine
RVRSLSSLREYFFRKNWLRLTW

SEQ ID NO: 8116 - protein, 20 aa, Artificial Sequence
  Description of Artificial Sequence: Synthetic peptide
  MOD_RES (4)..(4): phosphorylated serine
RVRSPTRSFFFRKNWLRLTW

SEQ ID NO: 8117 - protein, 20 aa, Artificial Sequence
  Description of Artificial Sequence: Synthetic peptide
  MOD_RES (4)..(4): phosphorylated serine
RVRSPTRSLFFRKNWLRLTW

SEQ ID NO: 8118 - protein, 20 aa, Artificial Sequence
  Description of Artificial Sequence: Synthetic peptide
  MOD_RES (4)..(4): phosphorylated serine
RVRSPTRSMFFRKNWLRLTW

SEQ ID NO: 8119 - protein, 20 aa, Artificial Sequence
  Description of Artificial Sequence: Synthetic peptide
  MOD_RES (4)..(4): phosphorylated serine
RVRSPTRSPFFRKNWLRLTW

SEQ ID NO: 8120 - protein, 20 aa, Artificial Sequence
  Description of Artificial Sequence: Synthetic peptide
  MOD_RES (4)..(4): phosphorylated serine
RVRSPTRSVFFRKNWLRLTW

SEQ ID NO: 8121 - protein, 20 aa, Artificial Sequence
  Description of Artificial Sequence: Synthetic peptide
  MOD_RES (4)..(4): phosphorylated serine
RVSSPISKKFFRKNWLRLTW

SEQ ID NO: 8122 - protein, 20 aa, Artificial Sequence
  Description of Artificial Sequence: Synthetic peptide
  MOD_RES (4)..(4): phosphorylated serine
RVSSPISKYFFRKNWLRLTW

SEQ ID NO: 8123 - protein, 20 aa, Artificial Sequence
  Description of Artificial Sequence: Synthetic peptide
  MOD_RES (4)..(4): phosphorylated serine
RVSSRFSSKFFRKNWLRLTW

SEQ ID NO: 8124 - protein, 20 aa, Artificial Sequence
  Description of Artificial Sequence: Synthetic peptide
  MOD_RES (4)..(4): phosphorylated serine
RVSSRFSSRFFRKNWLRLTW

SEQ ID NO: 8125 - protein, 20 aa, Artificial Sequence
  Description of Artificial Sequence: Synthetic peptide
  MOD_RES (4)..(4): phosphorylated serine
RVSSRFSSYFFRKNWLRLTW

SEQ ID NO: 8126 - protein, 21 aa, Artificial Sequence
  Description of Artificial Sequence: Synthetic peptide
  MOD_RES (4)..(4): phosphorylated serine
RVSSVKLISKFFRKNWLRLTW

SEQ ID NO: 8127 - protein, 21 aa, Artificial Sequence
  Description of Artificial Sequence: Synthetic peptide
  MOD_RES (4)..(4): phosphorylated serine
RVSSVKLISYFFRKNWLRLTW

SEQ ID NO: 8128 - protein, 20 aa, Artificial Sequence
  Description of Artificial Sequence: Synthetic peptide
  MOD_RES (4)..(4): phosphorylated serine
RVTSAEIKLFFRKNWLRLTW

SEQ ID NO: 8129 - protein, 20 aa, Artificial Sequence
  Description of Artificial Sequence: Synthetic peptide
  MOD_RES (4)..(4): phosphorylated serine
RVVSLSMRKFFRKNWLRLTW

SEQ ID NO: 8130 - protein, 20 aa, Artificial Sequence
  Description of Artificial Sequence: Synthetic peptide
  MOD_RES (4)..(4): phosphorylated serine
RVVSLSMRYFFRKNWLRLTW

SEQ ID NO: 8131 - protein, 21 aa, Artificial Sequence
  Description of Artificial Sequence: Synthetic peptide
  MOD_RES (9)..(9): phosphorylated serine
RVWEDRPSSAFFRKNWLRLTW

SEQ ID NO: 8132 - protein, 22 aa, Artificial Sequence
  Description of Artificial Sequence: Synthetic peptide
  MOD_RES (4)..(4): phosphorylated serine
RVWSPPRVHKVFFRKNWLRLTW

SEQ ID NO: 8133 - protein, 20 aa, Artificial Sequence
  Description of Artificial Sequence: Synthetic peptide
  MOD_RES (5)..(5): phosphorylated tyrosine
RVYQYIQSRFFRKNWLRLTW

SEQ ID NO: 8134 - protein, 22 aa, Artificial Sequence
  Description of Artificial Sequence: Synthetic peptide
  MOD_RES (5)..(5): phosphorylated tyrosine
RVYQYIQSRFKFFRKNWLRLTW

SEQ ID NO: 8135 - protein, 22 aa, Artificial Sequence
  Description of Artificial Sequence: Synthetic peptide
  MOD_RES (5)..(5): phosphorylated tyrosine
RVYQYIQSRFYFFRKNWLRLTW

SEQ ID NO: 8136 - protein, 21 aa, Artificial Sequence
  Description of Artificial Sequence: Synthetic peptide
  MOD_RES (5)..(5): phosphorylated tyrosine
RVYQYIQSRKFFRKNWLRLTW

SEQ ID NO: 8137 - protein, 21 aa, Artificial Sequence
  Description of Artificial Sequence: Synthetic peptide
  MOD_RES (5)..(5): phosphorylated tyrosine
RVYQYIQSRYFFRKNWLRLTW

SEQ ID NO: 8138 - protein, 20 aa, Artificial Sequence
  Description of Artificial Sequence: Synthetic peptide
  MOD_RES (4)..(4): phosphorylated serine
RVYSPYNHKFFRKNWLRLTW

SEQ ID NO: 8139 - protein, 20 aa, Artificial Sequence
  Description of Artificial Sequence: Synthetic peptide
  MOD_RES (4)..(4): phosphorylated serine
RVYSPYNHRFFRKNWLRLTW

SEQ ID NO: 8140 - protein, 20 aa, Artificial Sequence
  Description of Artificial Sequence: Synthetic peptide
  MOD_RES (4)..(4): phosphorylated serine
RVYSPYNHYFFRKNWLRLTW

SEQ ID NO: 8141 - protein, 20 aa, Artificial Sequence
  Description of Artificial Sequence: Synthetic peptide
  MOD_RES (6)..(6): phosphorylated serine
RVYSRSFSKFFRKNWLRLTW

SEQ ID NO: 8142 - protein, 20 aa, Artificial Sequence
  Description of Artificial Sequence: Synthetic peptide
  MOD_RES (6)..(6): phosphorylated serine
RVYSRSFSYFFRKNWLRLTW

SEQ ID NO: 8143 - protein, 20 aa, Artificial Sequence
  Description of Artificial Sequence: Synthetic peptide
  MOD_RES (4)..(4): phosphorylated serine
RYPSNLQLFFFRKNWLRLTW

SEQ ID NO: 8144 - protein, 20 aa, Artificial Sequence
  Description of Artificial Sequence: Synthetic peptide
  MOD_RES (4)..(4): phosphorylated threonine
RYQTQPVTLFFRKNWLRLTW

SEQ ID NO: 8145 - protein, 33 aa, Artificial Sequence; identical to SEQ ID NO: 5817
  Description of Artificial Sequence: Synthetic polypeptide
  MOD_RES (16)..(16): phosphorylated serine

SEQ ID NO: 8146 - protein, 25 aa, Artificial Sequence
  Description of Artificial Sequence: Synthetic peptide
  MOD_RES (5)..(5): phosphorylated serine
SARGSPTRPNPPVRFFRKNWLRLTW

SEQ ID NO: 8147 - protein, 20 aa, Artificial Sequence
  Description of Artificial Sequence: Synthetic peptide
  MOD_RES (5)..(5): phosphorylated threonine
SARRTPVSYFFRKNWLRLTW

SEQ ID NO: 8148 - protein, 21 aa, Artificial Sequence
  Description of Artificial Sequence: Synthetic peptide
  MOD_RES (1)..(1): phosphorylated serine
SDDEKMPDLEFFRKNWLRLTW

SEQ ID NO: 8149 - protein, 23 aa, Artificial Sequence
  Description of Artificial Sequence: Synthetic peptide
  MOD_RES (1)..(1): phosphorylated serine
SDFHAERAAREKFFRKNWLRLTW

SEQ ID NO: 8150 - protein, 20 aa, Artificial Sequence
  Description of Artificial Sequence: Synthetic peptide
  MOD_RES (3)..(3): oxidized methionine
  MOD_RES (8)..(8): phosphorylated serine
SDMPRAHSFFFRKNWLRLTW

SEQ ID NO: 8151 - protein, 20 aa, Artificial Sequence
  Description of Artificial Sequence: Synthetic peptide
  MOD_RES (8)..(8): phosphorylated serine
SDMPRAHSFFFRKNWLRLTW

SEQ ID NO: 8152 - protein, 20 aa, Artificial Sequence
  Description of Artificial Sequence: Synthetic peptide
  MOD_RES (8)..(8): phosphorylated serine
SEFKAMDSIFFRKNWLRLTW

SEQ ID NO: 8153 - protein, 20 aa, Artificial Sequence
  Description of Artificial Sequence: Synthetic peptide
  MOD_RES (4)..(4): phosphorylated serine
SEGSLHRKFFFRKNWLRLTW

SEQ ID NO: 8154 - protein, 20 aa, Artificial Sequence
  Description of Artificial Sequence: Synthetic peptide
  MOD_RES (4)..(4): phosphorylated serine
SEGSLHRKWFFRKNWLRLTW

SEQ ID NO: 8155 - protein, 20 aa, Artificial Sequence
  Description of Artificial Sequence: Synthetic peptide
  MOD_RES (4)..(4): phosphorylated serine
SEGSLHRKYFFRKNWLRLTW

SEQ ID NO: 8156 - protein, 20 aa, Artificial Sequence
  Description of Artificial Sequence: Synthetic peptide
  MOD_RES (4)..(4): phosphorylated serine
SELSPGRSVFFRKNWLRLTW

SEQ ID NO: 8157 - protein, 20 aa, Artificial Sequence
  Description of Artificial Sequence: Synthetic peptide
  MOD_RES (4)..(4): phosphorylated serine
SFDSGSVRLFFRKNWLRLTW

SEQ ID NO: 8158 - protein, 25 aa, Artificial Sequence
  Description of Artificial Sequence: Synthetic peptide
  MOD_RES (6)..(6): phosphorylated serine
SGGAQSPLRYLHVLFFRKNWLRLTW

SEQ ID NO: 8159 - protein, 30 aa, Artificial Sequence
  Description of Artificial Sequence: Synthetic polypeptide
  MOD_RES (1)..(1): phosphorylated serine
SGGDDDWTHLSSKEVDPSTFFRKNWLRLTW

SEQ ID NO: 8160 - protein, 31 aa, Artificial Sequence
  Description of Artificial Sequence: Synthetic polypeptide
  MOD_RES (1)..(1): phosphorylated serine
SGGDDDWTHLSSKEVDPSTGFFRKNWLRLTW

SEQ ID NO: 8161 - protein, 32 aa, Artificial Sequence
  Description of Artificial Sequence: Synthetic polypeptide
  MOD_RES (1)..(1): phosphorylated serine
SGGDDDWTHLSSKEVDPSTGEFFRKNWLRLTW

SEQ ID NO: 8162 - protein, 33 aa, Artificial Sequence
  Description of Artificial Sequence: Synthetic polypeptide
  MOD_RES (1)..(1): phosphorylated serine
SGGDDDWTHLSSKEVDPSTGELFFRKNWLRLTW

SEQ ID NO: 8163 - protein, 34 aa, Artificial Sequence
  Description of Artificial Sequence: Synthetic polypeptide
  MOD_RES (1)..(1): phosphorylated serine
SGGDDDWTHLSSKEVDPSTGELQFFRKNWLRLTW

SEQ ID NO: 8164 - protein, 29 aa, Artificial Sequence
  Description of Artificial Sequence: Synthetic peptide
  MOD_RES (11)..(11): phosphorylated serine
SGPKPLFRRMSSLVGPTQFFRKNWLRLTW

SEQ ID NO: 8165 - protein, 19 aa, Artificial Sequence
  Description of Artificial Sequence: Synthetic peptide
  MOD_RES (4)..(4): phosphorylated serine
SIDSPQKLFFRKNWLRLTW

SEQ ID NO: 8166 - protein, 19 aa, Artificial Sequence
  Description of Artificial Sequence: Synthetic peptide
  MOD_RES (4)..(4): phosphorylated serine
SIDSPQKYFFRKNWLRLTW

SEQ ID NO: 8167 - protein, 20 aa, Artificial Sequence
  Description of Artificial Sequence: Synthetic peptide
  MOD_RES (4)..(4): phosphorylated serine
SILSFVSGLFFRKNWLRLTW

SEQ ID NO: 8168 - protein, 20 aa, Artificial Sequence
  Description of Artificial Sequence: Synthetic peptide
  MOD_RES (4)..(4): phosphorylated serine
SIMSFHIDLFFRKNWLRLTW

SEQ ID NO: 8169 - protein, 20 aa, Artificial Sequence
  Description of Artificial Sequence: Synthetic peptide
  MOD_RES (3)..(3): oxidized methionine
  MOD_RES (4)..(4): phosphorylated serine
SIMSPEIQLFFRKNWLRLTW

SEQ ID NO: 8170 - protein, 20 aa, Artificial Sequence
  Description of Artificial Sequence: Synthetic peptide
  MOD_RES (4)..(4): phosphorylated serine
SIMSPEIQLFFRKNWLRLTW

SEQ ID NO: 8171 - protein, 20 aa, Artificial Sequence
  Description of Artificial Sequence: Synthetic peptide
  MOD_RES (4)..(4): phosphorylated threonine
SIPTVSGQIFFRKNWLRLTW

SEQ ID NO: 8172 - protein, 20 aa, Artificial Sequence
  Description of Artificial Sequence: Synthetic peptide
  MOD_RES (4)..(4): phosphorylated serine
SISSMEVNVFFRKNWLRLTW

SEQ ID NO: 8173 - protein, 20 aa, Artificial Sequence
  Description of Artificial Sequence: Synthetic peptide
  MOD_RES (5)..(5): phosphorylated threonine
SISSTPPAVFFRKNWLRLTW

SEQ ID NO: 8174 - protein, 33 aa, Artificial Sequence
  Description of Artificial Sequence: Synthetic polypeptide
  MOD_RES (21)..(21): phosphorylated serine
SKEDKNGHDGDTHQEDDGEKSDFFRKNWLRLTW

SEQ ID NO: 8175 - protein, 19 aa, Artificial Sequence
  Description of Artificial Sequence: Synthetic peptide
  MOD_RES (5)..(5): phosphorylated tyrosine
SKRGYIGLFFRKNWLRLTW

SEQ ID NO: 8176 - protein, 20 aa, Artificial Sequence
  Description of Artificial Sequence: Synthetic peptide
  MOD_RES (3)..(3): phosphorylated threonine
SKTVATFILFFRKNWLRLTW

SEQ ID NO: 8177 - protein, 20 aa, Artificial Sequence
  Description of Artificial Sequence: Synthetic peptide
  MOD_RES (4)..(4): phosphorylated serine
SLASLTEKIFFRKNWLRLTW

SEQ ID NO: 8178 - protein, 20 aa, Artificial Sequence
  Description of Artificial Sequence: Synthetic peptide
  MOD_RES (8)..(8): phosphorylated serine
SLDSEDYSLFFRKNWLRLTW

SEQ ID NO: 8179 - protein, 21 aa, Artificial Sequence
  Description of Artificial Sequence: Synthetic peptide
  MOD_RES (4)..(4): phosphorylated serine
SLDSLGDVFLFFRKNWLRLTW

SEQ ID NO: 8180 - protein, 21 aa, Artificial Sequence
  Description of Artificial Sequence: Synthetic peptide
  MOD_RES (4)..(4): phosphorylated serine
SLDSPSYVLYFFRKNWLRLTW

SEQ ID NO: 8181 - protein, 21 aa, Artificial Sequence
  Description of Artificial Sequence: Synthetic peptide
  MOD_RES (4)..(4): phosphorylated serine
SLESPSYVLYFFRKNWLRLTW

SEQ ID NO: 8182 - protein, 20 aa, Artificial Sequence
  Description of Artificial Sequence: Synthetic peptide
  MOD_RES (6)..(6): phosphorylated serine
SLFGGSVKLFFRKNWLRLTW

SEQ ID NO: 8183 - protein, 20 aa, Artificial Sequence
  Description of Artificial Sequence: Synthetic peptide
  MOD_RES (8)..(8): phosphorylated serine
SLFKRLYSLFFRKNWLRLTW

SEQ ID NO: 8184 - protein, 21 aa, Artificial Sequence
  Description of Artificial Sequence: Synthetic peptide
  MOD_RES (4)..(4): phosphorylated serine
SLFSGDEENAFFRKNWLRLTW

SEQ ID NO: 8185 - protein, 21 aa, Artificial Sequence
  Description of Artificial Sequence: Synthetic peptide
  MOD_RES (4)..(4): phosphorylated serine
SLFSGSYSSLFFRKNWLRLTW

SEQ ID NO: 8186 - protein, 20 aa, Artificial Sequence
  Description of Artificial Sequence: Synthetic peptide
  MOD_RES (4)..(4): phosphorylated serine
SLFSPQNTLFFRKNWLRLTW

SEQ ID NO: 8187 - protein, 20 aa, Artificial Sequence
  Description of Artificial Sequence: Synthetic peptide
  MOD_RES (4)..(4): phosphorylated serine
SLFSPRRNKFFRKNWLRLTW

SEQ ID NO: 8188 - protein, 20 aa, Artificial Sequence
  Description of Artificial Sequence: Synthetic peptide
  MOD_RES (4)..(4): phosphorylated serine
SLFSPRRNYFFRKNWLRLTW

SEQ ID NO: 8189 - protein, 21 aa, Artificial Sequence
  Description of Artificial Sequence: Synthetic peptide
  MOD_RES (4)..(4): phosphorylated serine
SLFSSEESNLFFRKNWLRLTW

SEQ ID NO: 8190 - protein, 23 aa, Artificial Sequence
  Description of Artificial Sequence: Synthetic peptide
  MOD_RES (4)..(4): phosphorylated serine
SLFSSEESNLGAFFRKNWLRLTW

SEQ ID NO: 8191 - protein, 20 aa, Artificial Sequence
  Description of Artificial Sequence: Synthetic peptide
  MOD_RES (8)..(8): phosphorylated serine
SLHDIQLSLFFRKNWLRLTW

SEQ ID NO: 8192 - protein, 20 aa, Artificial Sequence
  Description of Artificial Sequence: Synthetic peptide
  MOD_RES (4)..(4): phosphorylated serine
SLKSPVTVKFFRKNWLRLTW

SEQ ID NO: 8193 - protein, 22 aa, Artificial Sequence
  Description of Artificial Sequence: Synthetic peptide
  MOD_RES (5)..(5): phosphorylated serine
SLLASPGHISVFFRKNWLRLTW

SEQ ID NO: 8194 - protein, 20 aa, Artificial Sequence
  Description of Artificial Sequence: Synthetic peptide
  MOD_RES (8)..(8): phosphorylated serine
SLLHTSRSLFFRKNWLRLTW

SEQ ID NO: 8195 - protein, 21 aa, Artificial Sequence
  Description of Artificial Sequence: Synthetic peptide
  MOD_RES (7)..(7): phosphorylated serine
SLLNKSSPVKFFRKNWLRLTW

SEQ ID NO: 8196 - protein, 22 aa, Artificial Sequence
  Description of Artificial Sequence: Synthetic peptide
  MOD_RES (7)..(7): phosphorylated serine
SLLNKSSPVKKFFRKNWLRLTW

SEQ ID NO: 8197 - protein, 22 aa, Artificial Sequence
  Description of Artificial Sequence: Synthetic peptide
  MOD_RES (7)..(7): phosphorylated serine
SLLNKSSPVKYFFRKNWLRLTW

SEQ ID NO: 8198 - protein, 20 aa, Artificial Sequence
  Description of Artificial Sequence: Synthetic peptide
  MOD_RES (4)..(4): phosphorylated serine
SLLSLHVDLFFRKNWLRLTW

SEQ ID NO: 8199 - protein, 20 aa, Artificial Sequence
  Description of Artificial Sequence: Synthetic peptide
  MOD_RES (5)..(5): phosphorylated serine
SLLTSPPKAFFRKNWLRLTW

SEQ ID NO: 8200 - protein, 20 aa, Artificial Sequence
  Description of Artificial Sequence: Synthetic peptide
  MOD_RES (5)..(5): phosphorylated serine
SLLTSPPKVFFRKNWLRLTW

SEQ ID NO: 8201 - protein, 21 aa, Artificial Sequence
  Description of Artificial Sequence: Synthetic peptide
  MOD_RES (4)..(4): phosphorylated serine
SLMSGTLESLFFRKNWLRLTW

SEQ ID NO: 8202 - protein, 20 aa, Artificial Sequence
  Description of Artificial Sequence: Synthetic peptide
  MOD_RES (4)..(4): phosphorylated serine
SLMSPGRRKFFRKNWLRLTW

SEQ ID NO: 8203 - protein, 20 aa, Artificial Sequence
  Description of Artificial Sequence: Synthetic peptide
  MOD_RES (4)..(4): phosphorylated serine
SLMSPGRRYFFRKNWLRLTW

SEQ ID NO: 8204 - protein, 20 aa, Artificial Sequence
  Description of Artificial Sequence: Synthetic peptide
  MOD_RES (8)..(8): phosphorylated serine
SLQPRSHSVFFRKNWLRLTW

SEQ ID NO: 8205 - protein, 20 aa, Artificial Sequence
  Description of Artificial Sequence: Synthetic peptide
  MOD_RES (4)..(4): phosphorylated serine
SLQSLETSVFFRKNWLRLTW

SEQ ID NO: 8206 - protein, 20 aa, Artificial Sequence
  Description of Artificial Sequence: Synthetic peptide
  MOD_RES (5)..(5): phosphorylated serine
SLRRSVLMKFFRKNWLRLTW

SEQ ID NO: 8207 - protein, 20 aa, Artificial Sequence
  Description of Artificial Sequence: Synthetic peptide
  MOD_RES (5)..(5): phosphorylated serine
SLRRSVLMYFFRKNWLRLTW

SEQ ID NO: 8208 - protein, 20 aa, Artificial Sequence
  Description of Artificial Sequence: Synthetic peptide
  MOD_RES (4)..(4): phosphorylated serine
SLSSLLVKLFFRKNWLRLTW

SEQ ID NO: 8209 - protein, 20 aa, Artificial Sequence
  Description of Artificial Sequence: Synthetic peptide
  MOD_RES (3)..(3): phosphorylated threonine
SLTRSPPRVFFRKNWLRLTW

SEQ ID NO: 8210 - protein, 20 aa, Artificial Sequence
  Description of Artificial Sequence: Synthetic peptide
  MOD_RES (5)..(5): phosphorylated serine
SLTRSPPRVFFRKNWLRLTW

SEQ ID NO: 8211 - protein, 20 aa, Artificial Sequence
  Description of Artificial Sequence: Synthetic peptide
  MOD_RES (6)..(6): phosphorylated tyrosine
SLVDGYFRLFFRKNWLRLTW

SEQ ID NO: 8212 - protein, 20 aa, Artificial Sequence
  Description of Artificial Sequence: Synthetic peptide
  MOD_RES (8)..(8): phosphorylated serine
SLYDRPASYFFRKNWLRLTW

SEQ ID NO: 8213 - protein, 20 aa, Artificial Sequence
  Description of Artificial Sequence: Synthetic peptide
  MOD_RES (4)..(4): phosphorylated serine
SLYSPVKKKFFRKNWLRLTW

SEQ ID NO: 8214 - protein, 20 aa, Artificial Sequence
  Description of Artificial Sequence: Synthetic peptide
  MOD_RES (4)..(4): phosphorylated serine
SMFSPRRNKFFRKNWLRLTW

SEQ ID NO: 8215 - protein, 20 aa, Artificial Sequence
  Description of Artificial Sequence: Synthetic peptide
  MOD_RES (4)..(4): phosphorylated serine
SMKSPVTVKFFRKNWLRLTW

SEQ ID NO: 8216 - protein, 21 aa, Artificial Sequence
  Description of Artificial Sequence: Synthetic peptide
  MOD_RES (7)..(7): phosphorylated serine
SMLNKSSPVKFFRKNWLRLTW

SEQ ID NO: 8217 - protein, 22 aa, Artificial Sequence
  Description of Artificial Sequence: Synthetic peptide
  MOD_RES (7)..(7): phosphorylated serine
SMLNKSSPVKKFFRKNWLRLTW

SEQ ID NO: 8218 - protein, 21 aa, Artificial Sequence
  Description of Artificial Sequence: Synthetic peptide
  MOD_RES (4)..(4): phosphorylated serine
SMLSQEIQTLFFRKNWLRLTW

SEQ ID NO: 8219 - protein, 20 aa, Artificial Sequence
  Description of Artificial Sequence: Synthetic peptide
  MOD_RES (5)..(5): phosphorylated serine
SMLTSPPKAFFRKNWLRLTW

SEQ ID NO: 8220 - protein, 20 aa, Artificial Sequence
  Description of Artificial Sequence: Synthetic peptide
  MOD_RES (5)..(5): phosphorylated serine
SMLTSPPKVFFRKNWLRLTW

SEQ ID NO: 8221 - protein, 20 aa, Artificial Sequence
  Description of Artificial Sequence: Synthetic peptide
  MOD_RES (4)..(4): phosphorylated serine
SMMSPGRRKFFRKNWLRLTW

SEQ ID NO: 8222 - protein, 20 aa, Artificial Sequence
  Description of Artificial Sequence: Synthetic peptide
  MOD_RES (8)..(8): phosphorylated serine
SMQPRSHSVFFRKNWLRLTW

SEQ ID NO: 8223 - protein, 20 aa, Artificial Sequence
  Description of Artificial Sequence: Synthetic peptide
  MOD_RES (5)..(5): phosphorylated serine
SMRRSVLMKFFRKNWLRLTW

SEQ ID NO: 8224 - protein, 20 aa, Artificial Sequence
  Description of Artificial Sequence: Synthetic peptide
  MOD_RES (4)..(4): phosphorylated serine
SMSSLSREVFFRKNWLRLTW

SEQ ID NO: 8225 - protein, 20 aa, Artificial Sequence
  Description of Artificial Sequence: Synthetic peptide
  MOD_RES (3)..(3): phosphorylated threonine
SMTRSPPRVFFRKNWLRLTW

SEQ ID NO: 8226 - protein, 20 aa, Artificial Sequence
  Description of Artificial Sequence: Synthetic peptide
  MOD_RES (5)..(5): phosphorylated serine
SMTRSPPRVFFRKNWLRLTW

SEQ ID NO: 8227 - protein, 20 aa, Artificial Sequence
  Description of Artificial Sequence: Synthetic peptide
  MOD_RES (4)..(4): phosphorylated serine
SMYSPVKKKFFRKNWLRLTW

SEQ ID NO: 8228 - protein, 22 aa, Artificial Sequence
  Description of Artificial Sequence: Synthetic peptide
  MOD_RES (5)..(5): phosphorylated serine
SNFKSPVKTIRFFRKNWLRLTW

SEQ ID NO: 8229 - protein, 29 aa, Artificial Sequence
  Description of Artificial Sequence: Synthetic peptide
  MOD_RES (10)..(10): phosphorylated serine
SPAASISRLSGEQVDGKGFFRKNWLRLTW

SEQ ID NO: 8230 - protein, 20 aa, Artificial Sequence
  Description of Artificial Sequence: Synthetic peptide
  MOD_RES (4)..(4): phosphorylated serine
SPASPKISFFFRKNWLRLTW

SEQ ID NO: 8231 - protein, 20 aa, Artificial Sequence
  Description of Artificial Sequence: Synthetic peptide
  MOD_RES (4)..(4): phosphorylated serine
SPASPKISLFFRKNWLRLTW

SEQ ID NO: 8232 - protein, 20 aa, Artificial Sequence
  Description of Artificial Sequence: Synthetic peptide
  MOD_RES (4)..(4): phosphorylated serine
SPASPKISMFFRKNWLRLTW

SEQ ID NO: 8233 - protein, 20 aa, Artificial Sequence
  Description of Artificial Sequence: Synthetic peptide
  MOD_RES (4)..(4): phosphorylated serine
SPASPKISVFFRKNWLRLTW

SEQ ID NO: 8234 - protein, 20 aa, Artificial Sequence
  Description of Artificial Sequence: Synthetic peptide
  MOD_RES (4)..(4): phosphorylated serine
SPDSSQSSLFFRKNWLRLTW

SEQ ID NO: 8235 - protein, 28 aa, Artificial Sequence
  Description of Artificial Sequence: Synthetic peptide
  MOD_RES (1)..(1): phosphorylated serine
SPEDEYELLMPHRISSHFFRKNWLRLTW

SEQ ID NO: 8236 - protein, 28 aa, Artificial Sequence
  Description of Artificial Sequence: Synthetic peptide
  MOD_RES (15)..(15): phosphorylated serine
SPEDEYELLMPHRISSHFFRKNWLRLTW

SEQ ID NO: 8237 - protein, 22 aa, Artificial Sequence
  Description of Artificial Sequence: Synthetic peptide
  MOD_RES (9)..(9): phosphorylated serine
SPEKAGRRSSFFFRKNWLRLTW

SEQ ID NO: 8238 - protein, 22 aa, Artificial Sequence
  Description of Artificial Sequence: Synthetic peptide
  MOD_RES (9)..(9): phosphorylated serine
SPEKAGRRSSLFFRKNWLRLTW

SEQ ID NO: 8239 - protein, 22 aa, Artificial Sequence
  Description of Artificial Sequence: Synthetic peptide
  MOD_RES (9)..(9): phosphorylated serine
SPEKAGRRSSMFFRKNWLRLTW

SEQ ID NO: 8240 - protein, 22 aa, Artificial Sequence
  Description of Artificial Sequence: Synthetic peptide
  MOD_RES (9)..(9): phosphorylated serine
SPEKAGRRSSVFFRKNWLRLTW

SEQ ID NO: 8241 - protein, 29 aa, Artificial Sequence
  Description of Artificial Sequence: Synthetic peptide
  MOD_RES (1)..(1): phosphorylated serine
SPERPFLAILGGAKVADKFFRKNWLRLTW

SEQ ID NO: 8242 - protein, 31 aa, Artificial Sequence
  Description of Artificial Sequence: Synthetic polypeptide
  MOD_RES (1)..(1): phosphorylated serine
SPERPFLAILGGAKVADKIQFFRKNWLRLTW

SEQ ID NO: 8243 - protein, 20 aa, Artificial Sequence
  Description of Artificial Sequence: Synthetic peptide
  MOD_RES (8)..(8): phosphorylated serine
SPFKRQLSFFFRKNWLRLTW

SEQ ID NO: 8244 - protein, 20 aa, Artificial Sequence
  Description of Artificial Sequence: Synthetic peptide
  MOD_RES (8)..(8): phosphorylated serine
SPFKRQLSLFFRKNWLRLTW

SEQ ID NO: 8245 - protein, 20 aa, Artificial Sequence
  Description of Artificial Sequence: Synthetic peptide
  MOD_RES (8)..(8): phosphorylated serine
SPFKRQLSMFFRKNWLRLTW

SEQ ID NO: 8246 - protein, 20 aa, Artificial Sequence
  Description of Artificial Sequence: Synthetic peptide
  MOD_RES (8)..(8): phosphorylated serine
SPFKRQLSVFFRKNWLRLTW

SEQ ID NO: 8247 - protein, 20 aa, Artificial Sequence
  Description of Artificial Sequence: Synthetic peptide
  MOD_RES (5)..(5): phosphorylated serine
SPFLSKRSLFFRKNWLRLTW

SEQ ID NO: 8248 - protein, 21 aa, Artificial Sequence
  Description of Artificial Sequence: Synthetic peptide
  MOD_RES (9)..(9): phosphorylated serine
SPGLARKRSFFFRKNWLRLTW

SEQ ID NO: 8249 - protein, 21 aa, Artificial Sequence
  Description of Artificial Sequence: Synthetic peptide
  MOD_RES (9)..(9): phosphorylated serine
SPGLARKRSLFFRKNWLRLTW

SEQ ID NO: 8250 - protein, 21 aa, Artificial Sequence
  Description of Artificial Sequence: Synthetic peptide
  MOD_RES (9)..(9): phosphorylated serine
SPGLARKRSMFFRKNWLRLTW

SEQ ID NO: 8251 - protein, 21 aa, Artificial Sequence
  Description of Artificial Sequence: Synthetic peptide
  MOD_RES (9)..(9): phosphorylated serine
SPGLARKRSVFFRKNWLRLTW

SEQ ID NO: 8252 - protein, 20 aa, Artificial Sequence
  Description of Artificial Sequence: Synthetic peptide
  MOD_RES (4)..(4): phosphorylated serine
SPGSPRPAFFFRKNWLRLTW

SEQ ID NO: 8253 - protein, 20 aa, Artificial Sequence
  Description of Artificial Sequence: Synthetic peptide
  MOD_RES (4)..(4): phosphorylated serine
SPGSPRPALFFRKNWLRLTW

SEQ ID NO: 8254 - protein, 20 aa, Artificial Sequence
  Description of Artificial Sequence: Synthetic peptide
  MOD_RES (4)..(4): phosphorylated serine
SPGSPRPAMFFRKNWLRLTW

SEQ ID NO: 8255 - protein, 20 aa, Artificial Sequence
  Description of Artificial Sequence: Synthetic peptide
  MOD_RES (4)..(4): phosphorylated serine
SPGSPRPAVFFRKNWLRLTW

SEQ ID NO: 8256 - protein, 20 aa, Artificial Sequence
  Description of Artificial Sequence: Synthetic peptide
  MOD_RES (4)..(4): phosphorylated serine
SPKSPGLKAFFRKNWLRLTW

SEQ ID NO: 8257 - protein, 20 aa, Artificial Sequence
  Description of Artificial Sequence: Synthetic peptide
  MOD_RES (4)..(4): phosphorylated serine
SPKSPGLKFFFRKNWLRLTW

SEQ ID NO: 8258 - protein, 20 aa, Artificial Sequence
  Description of Artificial Sequence: Synthetic peptide
  MOD_RES (4)..(4): phosphorylated serine
SPKSPGLKLFFRKNWLRLTW

SEQ ID NO: 8259 - protein, 20 aa, Artificial Sequence
  Description of Artificial Sequence: Synthetic peptide
  MOD_RES (4)..(4): phosphorylated serine
SPKSPGLKMFFRKNWLRLTW

SEQ ID NO: 8260 - protein, 20 aa, Artificial Sequence
  Description of Artificial Sequence: Synthetic peptide
  MOD_RES (4)..(4): phosphorylated serine
SPKSPGLKVFFRKNWLRLTW

SEQ ID NO: 8261 - protein, 20 aa, Artificial Sequence
  Description of Artificial Sequence: Synthetic peptide
  MOD_RES (4)..(4): phosphorylated serine
SPKSPTAAFFFRKNWLRLTW

SEQ ID NO: 8262 - protein, 20 aa, Artificial Sequence
  Description of Artificial Sequence: Synthetic peptide
  MOD_RES (4)..(4): phosphorylated serine
SPKSPTAALFFRKNWLRLTW

SEQ ID NO: 8263 - protein, 20 aa, Artificial Sequence
  Description of Artificial Sequence: Synthetic peptide
  MOD_RES (4)..(4): phosphorylated serine
SPKSPTAAMFFRKNWLRLTW

SEQ ID NO: 8264 - protein, 20 aa, Artificial Sequence
  Description of Artificial Sequence: Synthetic peptide
  MOD_RES (4)..(4): phosphorylated serine
SPKSPTAAVFFRKNWLRLTW

SEQ ID NO: 8265 - protein, 20 aa, Artificial Sequence
  Description of Artificial Sequence: Synthetic peptide
  MOD_RES (8)..(8): phosphorylated serine
SPLTKSISLFFRKNWLRLTW

SEQ ID NO: 8266 - protein, 30 aa, Artificial Sequence
  Description of Artificial Sequence: Synthetic polypeptide
  MOD_RES (1)..(1): phosphorylated serine
SPPFPVPVYTRQAPKQVIKFFRKNWLRLTW

SEQ ID NO: 8267 - protein, 22 aa, Artificial Sequence
  Description of Artificial Sequence: Synthetic peptide
  MOD_RES (7)..(7): phosphorylated serine
SPRAPVSPLKFFFRKNWLRLTW

SEQ ID NO: 8268 - protein, 20 aa, Artificial Sequence
  Description of Artificial Sequence: Synthetic peptide
  MOD_RES (6)..(6): phosphorylated serine
SPRERSPALFFRKNWLRLTW

SEQ ID NO: 8269 - protein, 20 aa, Artificial Sequence
  Description of Artificial Sequence: Synthetic peptide
  MOD_RES (7)..(7): phosphorylated serine
SPRGEASSLFFRKNWLRLTW

SEQ ID NO: 8270 - protein, 20 aa, Artificial Sequence
  Description of Artificial Sequence: Synthetic peptide
  MOD_RES (8)..(8): phosphorylated serine
SPRGEASSLFFRKNWLRLTW

SEQ ID NO: 8271 - protein, 21 aa, Artificial Sequence
  Description of Artificial Sequence: Synthetic peptide
  MOD_RES (7)..(7): phosphorylated serine
SPRPPNSPSIFFRKNWLRLTW

SEQ ID NO: 8272 - protein, 21 aa, Artificial Sequence
  Description of Artificial Sequence: Synthetic peptide
  MOD_RES (5)..(5): phosphorylated serine
SPRRSLGLALFFRKNWLRLTW

SEQ ID NO: 8273 - protein, 21 aa, Artificial Sequence
  Description of Artificial Sequence: Synthetic peptide
  MOD_RES (5)..(5): phosphorylated serine
  MOD_RES (9)..(9): phosphorylated serine
SPRRSRSISFFFRKNWLRLTW

SEQ ID NO: 8274 - protein, 21 aa, Artificial Sequence
  Description of Artificial Sequence: Synthetic peptide
  MOD_RES (5)..(5): phosphorylated serine
SPRRSRSISFFFRKNWLRLTW

SEQ ID NO: 8275 - protein, 21 aa, Artificial Sequence
  Description of Artificial Sequence: Synthetic peptide
  MOD_RES (5)..(5): phosphorylated serine
  MOD_RES (9)..(9): phosphorylated serine
SPRRSRSISLFFRKNWLRLTW

SEQ ID NO: 8276 - protein, 21 aa, Artificial Sequence
  Description of Artificial Sequence: Synthetic peptide
  MOD_RES (5)..(5): phosphorylated serine
SPRRSRSISLFFRKNWLRLTW

SEQ ID NO: 8277 - protein, 21 aa, Artificial Sequence
  Description of Artificial Sequence: Synthetic peptide
  MOD_RES (5)..(5): phosphorylated serine
  MOD_RES (9)..(9): phosphorylated serine
SPRRSRSISMFFRKNWLRLTW

SEQ ID NO: 8278 - protein, 21 aa, Artificial Sequence
  Description of Artificial Sequence: Synthetic peptide
  MOD_RES (5)..(5): phosphorylated serine
SPRRSRSISMFFRKNWLRLTW

SEQ ID NO: 8279 - protein, 21 aa, Artificial Sequence
  Description of Artificial Sequence: Synthetic peptide
  MOD_RES (5)..(5): phosphorylated serine
  MOD_RES (9)..(9): phosphorylated serine
SPRRSRSISVFFRKNWLRLTW

SEQ ID NO: 8280 - protein, 21 aa, Artificial Sequence
  Description of Artificial Sequence: Synthetic peptide
  MOD_RES (5)..(5): phosphorylated serine
SPRRSRSISVFFRKNWLRLTW

SEQ ID NO: 8281 - protein, 20 aa, Artificial Sequence
  Description of Artificial Sequence: Synthetic peptide
  MOD_RES (4)..(4): phosphorylated serine
SPRSITSTFFFRKNWLRLTW

SEQ ID NO: 8282 - protein, 20 aa, Artificial Sequence
  Description of Artificial Sequence: Synthetic peptide
  MOD_RES (4)..(4): phosphorylated serine
SPRSITSTLFFRKNWLRLTW

SEQ ID NO: 8283 - protein, 20 aa, Artificial Sequence
  Description of Artificial Sequence: Synthetic peptide
  MOD_RES (4)..(4): phosphorylated serine
SPRSITSTMFFRKNWLRLTW

SEQ ID NO: 8284 - protein, 20 aa, Artificial Sequence
  Description of Artificial Sequence: Synthetic peptide
  MOD_RES (4)..(4): phosphorylated serine
SPRSITSTPFFRKNWLRLTW

SEQ ID NO: 8285 - protein, 20 aa, Artificial Sequence
  Description of Artificial Sequence: Synthetic peptide
  MOD_RES (4)..(4): phosphorylated serine
SPRSITSTVFFRKNWLRLTW

SEQ ID NO: 8286 - protein, 20 aa, Artificial Sequence
  Description of Artificial Sequence: Synthetic peptide
  MOD_RES (4)..(4): phosphorylated serine
SPRSPDRTLFFRKNWLRLTW

SEQ ID NO: 8287 - protein, 20 aa, Artificial Sequence
  Description of Artificial Sequence: Synthetic peptide
  MOD_RES (4)..(4): phosphorylated serine
SPRSPGKPFFFRKNWLRLTW

SEQ ID NO: 8288 - protein, 20 aa, Artificial Sequence
  Description of Artificial Sequence: Synthetic peptide
  MOD_RES (4)..(4): phosphorylated serine
SPRSPGKPLFFRKNWLRLTW

SEQ ID NO: 8289 - protein, 20 aa, Artificial Sequence
  Description of Artificial Sequence: Synthetic peptide
  MOD_RES (4)..(4): phosphorylated serine
SPRSPGKPMFFRKNWLRLTW

SEQ ID NO: 8290 - protein, 20 aa, Artificial Sequence
  Description of Artificial Sequence: Synthetic peptide
  MOD_RES (4)..(4): phosphorylated serine
SPRSPGKPVFFRKNWLRLTW

SEQ ID NO: 8291 - protein, 20 aa, Artificial Sequence
  Description of Artificial Sequence: Synthetic peptide
  MOD_RES (4)..(4): phosphorylated serine
SPRSPGRSFFFRKNWLRLTW

SEQ ID NO: 8292 - protein, 20 aa, Artificial Sequence
  Description of Artificial Sequence: Synthetic peptide
  MOD_RES (4)..(4): phosphorylated serine
SPRSPGRSIFFRKNWLRLTW

SEQ ID NO: 8293 - protein, 20 aa, Artificial Sequence
  Description of Artificial Sequence: Synthetic peptide
  MOD_RES (4)..(4): phosphorylated serine
SPRSPGRSLFFRKNWLRLTW

SEQ ID NO: 8294 - protein, 20 aa, Artificial Sequence
  Description of Artificial Sequence: Synthetic peptide
  MOD_RES (4)..(4): phosphorylated serine
SPRSPGRSMFFRKNWLRLTW

SEQ ID NO: 8295 - protein, 20 aa, Artificial Sequence
  Description of Artificial Sequence: Synthetic peptide
  MOD_RES (4)..(4): phosphorylated serine
SPRSPGRSVFFRKNWLRLTW

SEQ ID NO: 8296 - protein, 20 aa, Artificial Sequence
  Description of Artificial Sequence: Synthetic peptide
  MOD_RES (4)..(4): phosphorylated serine
  MOD_RES (9)..(9): Any amino acid
SPRSPGRSXFFRKNWLRLTW

SEQ ID NO: 8297 - protein, 20 aa, Artificial Sequence
  Description of Artificial Sequence: Synthetic peptide
  MOD_RES (4)..(4): phosphorylated serine
SPRSPSGLRFFRKNWLRLTW

SEQ ID NO: 8298 - protein, 21 aa, Artificial Sequence
  Description of Artificial Sequence: Synthetic peptide
  MOD_RES (4)..(4): phosphorylated serine
SPRSPSTTYFFFRKNWLRLTW

SEQ ID NO: 8299 - protein, 21 aa, Artificial Sequence
  Description of Artificial Sequence: Synthetic peptide
  MOD_RES (4)..(4): phosphorylated serine
SPRSPSTTYLFFRKNWLRLTW

SEQ ID NO: 8300 - protein, 21 aa, Artificial Sequence
  Description of Artificial Sequence: Synthetic peptide
  MOD_RES (6)..(6): phosphorylated serine
SPRSPSTTYLFFRKNWLRLTW

SEQ ID NO: 8301 - protein, 21 aa, Artificial Sequence
  Description of Artificial Sequence: Synthetic peptide
  MOD_RES (4)..(4): phosphorylated serine
SPRSPSTTYMFFRKNWLRLTW

SEQ ID NO: 8302 - protein, 21 aa, Artificial Sequence
  Description of Artificial Sequence: Synthetic peptide
  MOD_RES (4)..(4): phosphorylated serine
SPRSPSTTYVFFRKNWLRLTW

SEQ ID NO: 8303 - protein, 19 aa, Artificial Sequence
  Description of Artificial Sequence: Synthetic peptide
  MOD_RES (4)..(4): phosphorylated serine
  MOD_RES (5)..(5): phosphorylated serine
SPRSSQLVFFRKNWLRLTW

SEQ ID NO: 8304 - protein, 22 aa, Artificial Sequence
  Description of Artificial Sequence: Synthetic peptide
  MOD_RES (4)..(4): phosphorylated threonine
  MOD_RES (7)..(7): phosphorylated serine
SPRTPVSPVKFFFRKNWLRLTW

SEQ ID NO: 8305 - protein, 22 aa, Artificial Sequence
  Description of Artificial Sequence: Synthetic peptide
  MOD_RES (7)..(7): phosphorylated serine
SPRTPVSPVKFFFRKNWLRLTW

SEQ ID NO: 8306 - protein, 22 aa, Artificial Sequence
  Description of Artificial Sequence: Synthetic peptide
  MOD_RES (4)..(4): phosphorylated threonine
  MOD_RES (7)..(7): phosphorylated serine
SPRTPVSPVKLFFRKNWLRLTW

SEQ ID NO: 8307 - protein, 22 aa, Artificial Sequence
  Description of Artificial Sequence: Synthetic peptide
  MOD_RES (7)..(7): phosphorylated serine
SPRTPVSPVKLFFRKNWLRLTW

SEQ ID NO: 8308 - protein, 22 aa, Artificial Sequence
  Description of Artificial Sequence: Synthetic peptide
  MOD_RES (4)..(4): phosphorylated threonine
  MOD_RES (7)..(7): phosphorylated serine
SPRTPVSPVKMFFRKNWLRLTW

SEQ ID NO: 8309 - protein, 22 aa, Artificial Sequence
  Description of Artificial Sequence: Synthetic peptide
  MOD_RES (7)..(7): phosphorylated serine
SPRTPVSPVKMFFRKNWLRLTW

SEQ ID NO: 8310 - protein, 22 aa, Artificial Sequence
  Description of Artificial Sequence: Synthetic peptide
  MOD_RES (4)..(4): phosphorylated threonine
  MOD_RES (7)..(7): phosphorylated serine
SPRTPVSPVKVFFRKNWLRLTW

SEQ ID NO: 8311 - protein, 22 aa, Artificial Sequence
  Description of Artificial Sequence: Synthetic peptide
  MOD_RES (7)..(7): phosphorylated serine
SPRTPVSPVKVFFRKNWLRLTW

SEQ ID NO: 8312 - protein, 22 aa, Artificial Sequence
  Description of Artificial Sequence: Synthetic peptide
  MOD_RES (4)..(4): phosphorylated serine
SPSSPSVRRQFFFRKNWLRLTW

SEQ ID NO: 8313 - protein, 22 aa, Artificial Sequence
  Description of Artificial Sequence: Synthetic peptide
  MOD_RES (4)..(4): phosphorylated serine
SPSSPSVRRQLFFRKNWLRLTW

SEQ ID NO: 8314 - protein, 22 aa, Artificial Sequence
  Description of Artificial Sequence: Synthetic peptide
  MOD_RES (4)..(4): phosphorylated serine
SPSSPSVRRQMFFRKNWLRLTW

SEQ ID NO: 8315 - protein, 22 aa, Artificial Sequence
  Description of Artificial Sequence: Synthetic peptide
  MOD_RES (4)..(4): phosphorylated serine
SPSSPSVRRQVFFRKNWLRLTW

SEQ ID NO: 8316 - protein, 24 aa, Artificial Sequence
  Description of Artificial Sequence: Synthetic peptide
  MOD_RES (10)..(10): phosphorylated serine
SPSTSRSGGSSRFFFRKNWLRLTW

SEQ ID NO: 8317 - protein, 24 aa, Artificial Sequence
  Description of Artificial Sequence: Synthetic peptide
  MOD_RES (10)..(10): phosphorylated serine
SPSTSRSGGSSRLFFRKNWLRLTW

SEQ ID NO: 8318 - protein, 24 aa, Artificial Sequence
  Description of Artificial Sequence: Synthetic peptide
  MOD_RES (10)..(10): phosphorylated serine
SPSTSRSGGSSRMFFRKNWLRLTW

SEQ ID NO: 8319 - protein, 24 aa, Artificial Sequence
  Description of Artificial Sequence: Synthetic peptide
  MOD_RES (10)..(10): phosphorylated serine
SPSTSRSGGSSRVFFRKNWLRLTW

SEQ ID NO: 8320 - protein, 24 aa, Artificial Sequence
  Description of Artificial Sequence: Synthetic peptide
  MOD_RES (1)..(1): phosphorylated serine
SPTRPNPPVRNLHFFRKNWLRLTW

SEQ ID NO: 8321 - protein, 20 aa, Artificial Sequence
  Description of Artificial Sequence: Synthetic peptide
  MOD_RES (4)..(4): phosphorylated serine
SPVSPMKELFFRKNWLRLTW

SEQ ID NO: 8322 - protein, 21 aa, Artificial Sequence
  Description of Artificial Sequence: Synthetic peptide
  MOD_RES (4)..(4): phosphorylated serine
SPVSTRPLEPFFRKNWLRLTW

SEQ ID NO: 8323 - protein, 21 aa, Artificial Sequence
  Description of Artificial Sequence: Synthetic peptide
  MOD_RES (5)..(5): phosphorylated threonine
SPVSTRPLEPFFRKNWLRLTW

SEQ ID NO: 8324 - protein, 19 aa, Artificial Sequence
  Description of Artificial Sequence: Synthetic peptide
  MOD_RES (7)..(7): phosphorylated serine
SPVVHQSFFFRKNWLRLTW

SEQ ID NO: 8325 - protein, 19 aa, Artificial Sequence
  Description of Artificial Sequence: Synthetic peptide
  MOD_RES (7)..(7): phosphorylated serine
SPVVHQSLFFRKNWLRLTW

SEQ ID NO: 8326 - protein, 19 aa, Artificial Sequence
  Description of Artificial Sequence: Synthetic peptide
  MOD_RES (7)..(7): phosphorylated serine
SPVVHQSMFFRKNWLRLTW

SEQ ID NO: 8327 - protein, 19 aa, Artificial Sequence
  Description of Artificial Sequence: Synthetic peptide
  MOD_RES (7)..(7): phosphorylated serine
SPVVHQSVFFRKNWLRLTW

SEQ ID NO: 8328 - protein, 21 aa, Artificial Sequence
  Description of Artificial Sequence: Synthetic peptide
  MOD_RES (4)..(4): phosphorylated serine
SQISPKSWGVFFRKNWLRLTW

SEQ ID NO: 8329 - protein, 19 aa, Artificial Sequence
  Description of Artificial Sequence: Synthetic peptide
  MOD_RES (6)..(6): phosphorylated serine
SRDKHSEYFFRKNWLRLTW

SEQ ID NO: 8330 - protein, 19 aa, Artificial Sequence
  Description of Artificial Sequence: Synthetic peptide
  MOD_RES (6)..(6): phosphorylated serine
SREKHSEIFFRKNWLRLTW

SEQ ID NO: 8331 - protein, 19 aa, Artificial Sequence
  Description of Artificial Sequence: Synthetic peptide
  MOD_RES (6)..(6): phosphorylated serine
SREKHSELFFRKNWLRLTW

SEQ ID NO: 8332 - protein, 20 aa, Artificial Sequence
  Description of Artificial Sequence: Synthetic peptide
  MOD_RES (8)..(8): phosphorylated serine
SRFNRRVSVFFRKNWLRLTW

SEQ ID NO: 8333 - protein, 19 aa, Artificial Sequence
  Description of Artificial Sequence: Synthetic peptide
  MOD_RES (7)..(7): phosphorylated serine
SRLTHLSFFFRKNWLRLTW

SEQ ID NO: 8334 - protein, 19 aa, Artificial Sequence
  Description of Artificial Sequence: Synthetic peptide
  MOD_RES (7)..(7): phosphorylated serine
SRLTHLSKFFRKNWLRLTW

SEQ ID NO: 8335 - protein, 19 aa, Artificial Sequence
  Description of Artificial Sequence: Synthetic peptide
  MOD_RES (7)..(7): phosphorylated serine
SRLTHLSLFFRKNWLRLTW

SEQ ID NO: 8336 - protein, 19 aa, Artificial Sequence
  Description of Artificial Sequence: Synthetic peptide
  MOD_RES (7)..(7): phosphorylated serine
SRLTHLSMFFRKNWLRLTW

SEQ ID NO: 8337 - protein, 19 aa, Artificial Sequence
  Description of Artificial Sequence: Synthetic peptide
  MOD_RES (7)..(7): phosphorylated serine
SRLTHLSRFFRKNWLRLTW

SEQ ID NO: 8338 - protein, 19 aa, Artificial Sequence
  Description of Artificial Sequence: Synthetic peptide
  MOD_RES (7)..(7): phosphorylated serine
SRLTHLSYFFRKNWLRLTW

SEQ ID NO: 8339 - protein, 20 aa, Artificial Sequence
  Description of Artificial Sequence: Synthetic peptide
  MOD_RES (4)..(4): phosphorylated serine
SRMSPKAQFFFRKNWLRLTW

SEQ ID NO: 8340 - protein, 20 aa, Artificial Sequence
  Description of Artificial Sequence: Synthetic peptide
  MOD_RES (4)..(4): phosphorylated serine
SRMSPKAQKFFRKNWLRLTW

SEQ ID NO: 8341 - protein, 20 aa, Artificial Sequence
  Description of Artificial Sequence: Synthetic peptide
  MOD_RES (4)..(4): phosphorylated serine
SRMSPKAQLFFRKNWLRLTW

SEQ ID NO: 8342 - protein, 20 aa, Artificial Sequence
  Description of Artificial Sequence: Synthetic peptide
  MOD_RES (4)..(4): phosphorylated serine
SRMSPKAQMFFRKNWLRLTW

SEQ ID NO: 8343 - protein, 20 aa, Artificial Sequence
  Description of Artificial Sequence: Synthetic peptide
  MOD_RES (4)..(4): phosphorylated serine
SRMSPKAQRFFRKNWLRLTW

SEQ ID NO: 8344 - protein, 20 aa, Artificial Sequence
  Description of Artificial Sequence: Synthetic peptide
  MOD_RES (4)..(4): phosphorylated serine
SRMSPKAQYFFRKNWLRLTW

SEQ ID NO: 8345 - protein, 21 aa, Artificial Sequence
  Description of Artificial Sequence: Synthetic peptide
  MOD_RES (3)..(3): phosphorylated serine
SRSSRSPYSRFFRKNWLRLTW

SEQ ID NO: 8346 - protein, 20 aa, Artificial Sequence
  Description of Artificial Sequence: Synthetic peptide
  MOD_RES (4)..(4): phosphorylated serine
  MOD_RES (8)..(8): phosphorylated serine
SRSSSVLSLFFRKNWLRLTW

SEQ ID NO: 8347 - protein, 20 aa, Artificial Sequence
  Description of Artificial Sequence: Synthetic peptide
  MOD_RES (5)..(5): phosphorylated serine
SRSSSVLSLFFRKNWLRLTW

SEQ ID NO: 8348 - protein, 20 aa, Artificial Sequence
  Description of Artificial Sequence: Synthetic peptide
  MOD_RES (8)..(8): phosphorylated serine
SRSSSVLSLFFRKNWLRLTW

SEQ ID NO: 8349 - protein, 20 aa, Artificial Sequence
  Description of Artificial Sequence: Synthetic peptide
  MOD_RES (4)..(4): phosphorylated serine
SRTSPITRFFFRKNWLRLTW

SEQ ID NO: 8350 - protein, 20 aa, Artificial Sequence
  Description of Artificial Sequence: Synthetic peptide
  MOD_RES (4)..(4): phosphorylated serine
SRTSPITRKFFRKNWLRLTW

SEQ ID NO: 8351 - protein, 20 aa, Artificial Sequence
  Description of Artificial Sequence: Synthetic peptide
  MOD_RES (4)..(4): phosphorylated serine
SRTSPITRLFFRKNWLRLTW

SEQ ID NO: 8352 - protein, 20 aa, Artificial Sequence
  Description of Artificial Sequence: Synthetic peptide
  MOD_RES (4)..(4): phosphorylated serine
SRTSPITRMFFRKNWLRLTW

SEQ ID NO: 8353 - protein, 20 aa, Artificial Sequence
  Description of Artificial Sequence: Synthetic peptide
  MOD_RES (4)..(4): phosphorylated serine
SRTSPITRRFFRKNWLRLTW

SEQ ID NO: 8354 - protein, 20 aa, Artificial Sequence
  Description of Artificial Sequence: Synthetic peptide
  MOD_RES (4)..(4): phosphorylated serine
SRTSPITRYFFRKNWLRLTW

SEQ ID NO: 8355 - protein, 20 aa, Artificial Sequence
  Description of Artificial Sequence: Synthetic peptide
  MOD_RES (4)..(4): phosphorylated serine
SRWSGSHQFFFRKNWLRLTW

SEQ ID NO: 8356 - protein, 20 aa, Artificial Sequence
  Description of Artificial Sequence: Synthetic peptide
  MOD_RES (4)..(4): phosphorylated serine
SRWSGSHQKFFRKNWLRLTW

SEQ ID NO: 8357 - protein, 20 aa, Artificial Sequence
  Description of Artificial Sequence: Synthetic peptide
  MOD_RES (4)..(4): phosphorylated serine
SRWSGSHQRFFRKNWLRLTW

SEQ ID NO: 8358 - protein, 20 aa, Artificial Sequence
  Description of Artificial Sequence: Synthetic peptide
  MOD_RES (4)..(4): phosphorylated serine
SRWSGSHQYFFRKNWLRLTW

SEQ ID NO: 8359 - protein, 21 aa, Artificial Sequence
  Description of Artificial Sequence: Synthetic peptide
  MOD_RES (4)..(4): phosphorylated serine
  MOD_RES (6)..(6): phosphorylated serine
SRYSRSPYSFFFRKNWLRLTW

SEQ ID NO: 8360 - protein, 21 aa, Artificial Sequence
  Description of Artificial Sequence: Synthetic peptide
  MOD_RES (4)..(4): phosphorylated serine
SRYSRSPYSFFFRKNWLRLTW

SEQ ID NO: 8361 - protein, 21 aa, Artificial Sequence
  Description of Artificial Sequence: Synthetic peptide
  MOD_RES (6)..(6): phosphorylated serine
SRYSRSPYSFFFRKNWLRLTW

SEQ ID NO: 8362 - protein, 21 aa, Artificial Sequence
  Description of Artificial Sequence: Synthetic peptide
  MOD_RES (4)..(4): phosphorylated serine
  MOD_RES (6)..(6): phosphorylated serine
SRYSRSPYSKFFRKNWLRLTW

SEQ ID NO: 8363 - protein, 21 aa, Artificial Sequence
  Description of Artificial Sequence: Synthetic peptide
  MOD_RES (4)..(4): phosphorylated serine
SRYSRSPYSKFFRKNWLRLTW

SEQ ID NO: 8364 - protein, 21 aa, Artificial Sequence
  Description of Artificial Sequence: Synthetic peptide
  MOD_RES (6)..(6): phosphorylated serine
SRYSRSPYSKFFRKNWLRLTW

SEQ ID NO: 8365 - protein, 21 aa, Artificial Sequence
  Description of Artificial Sequence: Synthetic peptide
  MOD_RES (4)..(4): phosphorylated serine
  MOD_RES (6)..(6): phosphorylated serine
SRYSRSPYSLFFRKNWLRLTW

SEQ ID NO: 8366 - protein, 21 aa, Artificial Sequence
  Description of Artificial Sequence: Synthetic peptide
  MOD_RES (4)..(4): phosphorylated serine
SRYSRSPYSLFFRKNWLRLTW

SEQ ID NO: 8367 - protein, 21 aa, Artificial Sequence
  Description of Artificial Sequence: Synthetic peptide
  MOD_RES (6)..(6): phosphorylated serine
SRYSRSPYSLFFRKNWLRLTW

SEQ ID NO: 8368 - protein, 21 aa, Artificial Sequence
  Description of Artificial Sequence: Synthetic peptide
  MOD_RES (4)..(4): phosphorylated serine
  MOD_RES (6)..(6): phosphorylated serine
SRYSRSPYSMFFRKNWLRLTW

SEQ ID NO: 8369 - protein, 21 aa, Artificial Sequence
  Description of Artificial Sequence: Synthetic peptide
  MOD_RES (4)..(4): phosphorylated serine
SRYSRSPYSMFFRKNWLRLTW

SEQ ID NO: 8370 - protein, 21 aa, Artificial Sequence
  Description of Artificial Sequence: Synthetic peptide
  MOD_RES (6)..(6): phosphorylated serine
SRYSRSPYSMFFRKNWLRLTW

SEQ ID NO: 8371 - protein, 21 aa, Artificial Sequence
  Description of Artificial Sequence: Synthetic peptide
  MOD_RES (4)..(4): phosphorylated serine
  MOD_RES (6)..(6): phosphorylated serine
SRYSRSPYSRFFRKNWLRLTW

SEQ ID NO: 8372 - protein, 21 aa, Artificial Sequence
  Description of Artificial Sequence: Synthetic peptide
  MOD_RES (4)..(4): phosphorylated serine
SRYSRSPYSRFFRKNWLRLTW

SEQ ID NO: 8373 - protein, 21 aa, Artificial Sequence
  Description of Artificial Sequence: Synthetic peptide
  MOD_RES (6)..(6): phosphorylated serine
SRYSRSPYSRFFRKNWLRLTW

SEQ ID NO: 8374 - protein, 21 aa, Artificial Sequence
  Description of Artificial Sequence: Synthetic peptide
  MOD_RES (4)..(4): phosphorylated serine
  MOD_RES (6)..(6): phosphorylated serine
SRYSRSPYSYFFRKNWLRLTW

SEQ ID NO: 8375 - protein, 21 aa, Artificial Sequence
  Description of Artificial Sequence: Synthetic peptide
  MOD_RES (4)..(4): phosphorylated serine
SRYSRSPYSYFFRKNWLRLTW

SEQ ID NO: 8376 - protein, 21 aa, Artificial Sequence
  Description of Artificial Sequence: Synthetic peptide
  MOD_RES (6)..(6): phosphorylated serine
SRYSRSPYSYFFRKNWLRLTW

SEQ ID NO: 8377 - protein, 22 aa, Artificial Sequence
  Description of Artificial Sequence: Synthetic peptide
  MOD_RES (4)..(4): phosphorylated serine
  MOD_RES (6)..(6): phosphorylated threonine
  MOD_RES (7)..(7): phosphorylated serine
SRYSRTSPYSRFFRKNWLRLTW

SEQ ID NO: 8378 - protein, 20 aa, Artificial Sequence
  Description of Artificial Sequence: Synthetic peptide
  MOD_RES (5)..(5): phosphorylated serine
SSDISPTRLFFRKNWLRLTW

SEQ ID NO: 8379 - protein, 20 aa, Artificial Sequence
  Description of Artificial Sequence: Synthetic peptide
  MOD_RES (5)..(5): phosphorylated serine
SSDISPTRYFFRKNWLRLTW

SEQ ID NO: 8380 - protein, 19 aa, Artificial Sequence
  Description of Artificial Sequence: Synthetic peptide
  MOD_RES (6)..(6): phosphorylated serine
SSDKHSEYFFRKNWLRLTW

SEQ ID NO: 8381 - protein, 21 aa, Artificial Sequence
  Description of Artificial Sequence: Synthetic peptide
  MOD_RES (9)..(9): phosphorylated serine
SSDPASQLSYFFRKNWLRLTW

SEQ ID NO: 8382 - protein, 20 aa, Artificial Sequence
  Description of Artificial Sequence: Synthetic peptide
  MOD_RES (4)..(4): phosphorylated serine
SSDSETLRYFFRKNWLRLTW

SEQ ID NO: 8383 - protein, 19 aa, Artificial Sequence
  Description of Artificial Sequence: Synthetic peptide
  MOD_RES (4)..(4): phosphorylated serine
SSDSPQKLFFRKNWLRLTW

SEQ ID NO: 8384 - protein, 19 aa, Artificial Sequence
  Description of Artificial Sequence: Synthetic peptide
  MOD_RES (4)..(4): phosphorylated serine
SSDSPQKYFFRKNWLRLTW

SEQ ID NO: 8385 - protein, 21 aa, Artificial Sequence
  Description of Artificial Sequence: Synthetic peptide
  MOD_RES (4)..(4): phosphorylated serine
SSDSPSYVLYFFRKNWLRLTW

SEQ ID NO: 8386 - protein, 21 aa, Artificial Sequence
  Description of Artificial Sequence: Synthetic peptide
  MOD_RES (4)..(4): phosphorylated serine
SSDSPTNHFFFFRKNWLRLTW

SEQ ID NO: 8387 - protein, 20 aa, Artificial Sequence
  Description of Artificial Sequence: Synthetic peptide
  MOD_RES (5)..(5): phosphorylated serine
SSEISPTRYFFRKNWLRLTW

SEQ ID NO: 8388 - protein, 19 aa, Artificial Sequence
  Description of Artificial Sequence: Synthetic peptide
  MOD_RES (6)..(6): phosphorylated serine
SSEKHSEYFFRKNWLRLTW

SEQ ID NO: 8389 - protein, 21 aa, Artificial Sequence
  Description of Artificial Sequence: Synthetic peptide
  MOD_RES (9)..(9): phosphorylated serine
SSEPASQLSYFFRKNWLRLTW

SEQ ID NO: 8390 - protein, 20 aa, Artificial Sequence
  Description of Artificial Sequence: Synthetic peptide
  MOD_RES (4)..(4): phosphorylated serine
SSESETLRYFFRKNWLRLTW

SEQ ID NO: 8391 - protein, 19 aa, Artificial Sequence
  Description of Artificial Sequence: Synthetic peptide
  MOD_RES (4)..(4): phosphorylated serine
SSESPQKLFFRKNWLRLTW

SEQ ID NO: 8392 - protein, 19 aa, Artificial Sequence
  Description of Artificial Sequence: Synthetic peptide
  MOD_RES (4)..(4): phosphorylated serine
SSESPQKYFFRKNWLRLTW

SEQ ID NO: 8393 - protein, 21 aa, Artificial Sequence
  Description of Artificial Sequence: Synthetic peptide
  MOD_RES (4)..(4): phosphorylated serine
SSESPSYVLYFFRKNWLRLTW

SEQ ID NO: 8394 - protein, 21 aa, Artificial Sequence
  Description of Artificial Sequence: Synthetic peptide
  MOD_RES (4)..(4): phosphorylated serine
SSESPTNHFYFFRKNWLRLTW

SEQ ID NO: 8395 - protein, 28 aa, Artificial Sequence
  Description of Artificial Sequence: Synthetic peptide
  MOD_RES (11)..(11): phosphorylated serine
SSNGKMASRRSEEKEAGFFRKNWLRLTW

SEQ ID NO: 8396 - protein, 30 aa, Artificial Sequence
  Description of Artificial Sequence: Synthetic polypeptide
  MOD_RES (11)..(11): phosphorylated serine
SSNGKMASRRSEEKEAGEIFFRKNWLRLTW

SEQ ID NO: 8397 - protein, 22 aa, Artificial Sequence
  Description of Artificial Sequence: Synthetic peptide
  MOD_RES (2)..(2): phosphorylated serine
SSPIMRKKVSLFFRKNWLRLTW

SEQ ID NO: 8398 - protein, 31 aa, Artificial Sequence
  Description of Artificial Sequence: Synthetic polypeptide
  MOD_RES (1)..(1): phosphorylated serine
SSPPFPVPVYTRQAPKQVIKFFRKNWLRLTW

SEQ ID NO: 8399 - protein, 23 aa, Artificial Sequence
  Description of Artificial Sequence: Synthetic peptide
  MOD_RES (3)..(3): phosphorylated serine
SSSPTHAKSAHVFFRKNWLRLTW

SEQ ID NO: 8400 - protein, 27 aa, Artificial Sequence
  Description of Artificial Sequence: Synthetic peptide
  MOD_RES (3)..(3): phosphorylated serine
SSSWRILGSKQSEHRPFFRKNWLRLTW

SEQ ID NO: 8401 - protein, 20 aa, Artificial Sequence
  Description of Artificial Sequence: Synthetic peptide
  MOD_RES (5)..(5): phosphorylated serine
STDISPTRLFFRKNWLRLTW

SEQ ID NO: 8402 - protein, 20 aa, Artificial Sequence
  Description of Artificial Sequence: Synthetic peptide
  MOD_RES (5)..(5): phosphorylated serine
STDISPTRYFFRKNWLRLTW

SEQ ID NO: 8403 - protein, 19 aa, Artificial Sequence
  Description of Artificial Sequence: Synthetic peptide
  MOD_RES (6)..(6): phosphorylated serine
STDKHSEYFFRKNWLRLTW

SEQ ID NO: 8404 - protein, 21 aa, Artificial Sequence
  Description of Artificial Sequence: Synthetic peptide
  MOD_RES (9)..(9): phosphorylated serine
STDPASQLSYFFRKNWLRLTW

SEQ ID NO: 8405 - protein, 20 aa, Artificial Sequence
  Description of Artificial Sequence: Synthetic peptide
  MOD_RES (4)..(4): phosphorylated serine
STDSETLRYFFRKNWLRLTW

SEQ ID NO: 8406 - protein, 19 aa, Artificial Sequence
  Description of Artificial Sequence: Synthetic peptide
  MOD_RES (4)..(4): phosphorylated serine
STDSPQKYFFRKNWLRLTW

SEQ ID NO: 8407 - protein, 21 aa, Artificial Sequence
  Description of Artificial Sequence: Synthetic peptide
  MOD_RES (4)..(4): phosphorylated serine
STDSPSYVLYFFRKNWLRLTW

SEQ ID NO: 8408 - protein, 21 aa, Artificial Sequence
  Description of Artificial Sequence: Synthetic peptide
  MOD_RES (4)..(4): phosphorylated serine
STDSPTNHFYFFRKNWLRLTW

SEQ ID NO: 8409 - protein, 20 aa, Artificial Sequence
  Description of Artificial Sequence: Synthetic peptide
  MOD_RES (5)..(5): phosphorylated serine
STEISPTRLFFRKNWLRLTW

SEQ ID NO: 8410 - protein, 20 aa, Artificial Sequence
  Description of Artificial Sequence: Synthetic peptide
  MOD_RES (5)..(5): phosphorylated serine
STEISPTRYFFRKNWLRLTW

SEQ ID NO: 8411 - protein, 19 aa, Artificial Sequence
  Description of Artificial Sequence: Synthetic peptide
  MOD_RES (6)..(6): phosphorylated serine
STEKHSEYFFRKNWLRLTW

SEQ ID NO: 8412 - protein, 21 aa, Artificial Sequence
  Description of Artificial Sequence: Synthetic peptide
  MOD_RES (9)..(9): phosphorylated serine
STEPASQLSYFFRKNWLRLTW

SEQ ID NO: 8413 - protein, 20 aa, Artificial Sequence
  Description of Artificial Sequence: Synthetic peptide
  MOD_RES (4)..(4): phosphorylated serine
STESETLRYFFRKNWLRLTW

SEQ ID NO: 8414 - protein, 19 aa, Artificial Sequence
  Description of Artificial Sequence: Synthetic peptide
  MOD_RES (4)..(4): phosphorylated serine
STESPQKYFFRKNWLRLTW

SEQ ID NO: 8415 - protein, 21 aa, Artificial Sequence
  Description of Artificial Sequence: Synthetic peptide
  MOD_RES (4)..(4): phosphorylated serine
STESPSYVLYFFRKNWLRLTW

SEQ ID NO: 8416 - protein, 21 aa, Artificial Sequence
  Description of Artificial Sequence: Synthetic peptide
  MOD_RES (4)..(4): phosphorylated serine
STESPTNHFYFFRKNWLRLTW

SEQ ID NO: 8417 - protein, 21 aa, Artificial Sequence
  Description of Artificial Sequence: Synthetic peptide
  MOD_RES (6)..(6): phosphorylated serine
STIQNSPTKKFFRKNWLRLTW

SEQ ID NO: 8418 - protein, 21 aa, Artificial Sequence
  Description of Artificial Sequence: Synthetic peptide
  MOD_RES (1)..(1): phosphorylated serine
STMSLNIITVFFRKNWLRLTW

SEQ ID NO: 8419 - protein, 21 aa, Artificial Sequence
  Description of Artificial Sequence: Synthetic peptide
  MOD_RES (4)..(4): phosphorylated serine
STMSLNIITVFFRKNWLRLTW

SEQ ID NO: 8420 - protein, 20 aa, Artificial Sequence
  Description of Artificial Sequence: Synthetic peptide
  MOD_RES (5)..(5): phosphorylated serine
SVDISPIRLFFRKNWLRLTW

SEQ ID NO: 8421 - protein, 20 aa, Artificial Sequence
  Description of Artificial Sequence: Synthetic peptide
  MOD_RES (5)..(5): phosphorylated serine
SVDISPTRLFFRKNWLRLTW

SEQ ID NO: 8422 - protein, 20 aa, Artificial Sequence
  Description of Artificial Sequence: Synthetic peptide
  MOD_RES (5)..(5): phosphorylated serine
SVDISPTRYFFRKNWLRLTW

SEQ ID NO: 8423 - protein, 20 aa, Artificial Sequence
  Description of Artificial Sequence: Synthetic peptide
  MOD_RES (4)..(4): phosphorylated serine
SVFSPSFGLFFRKNWLRLTW

SEQ ID NO: 8424 - protein, 21 aa, Artificial Sequence
  Description of Artificial Sequence: Synthetic peptide
  MOD_RES (4)..(4): phosphorylated serine
SVGSDYYIQLFFRKNWLRLTW

SEQ ID NO: 8425 - protein, 20 aa, Artificial Sequence
  Description of Artificial Sequence: Synthetic peptide
  MOD_RES (8)..(8): phosphorylated serine
SVKPRRTSLFFRKNWLRLTW

SEQ ID NO: 8426 - protein, 20 aa, Artificial Sequence
  Description of Artificial Sequence: Synthetic peptide
  MOD_RES (4)..(4): phosphorylated serine
SVKSPVTVKFFRKNWLRLTW

SEQ ID NO: 8427 - protein, 20 aa, Artificial Sequence
  Description of Artificial Sequence: Synthetic peptide
  MOD_RES (4)..(4): phosphorylated serine
SVKSPVTVYFFRKNWLRLTW

SEQ ID NO: 8428 - protein, 20 aa, Artificial Sequence
  Description of Artificial Sequence: Synthetic peptide
  MOD_RES (4)..(4): phosphorylated serine
SVLSPSFQLFFRKNWLRLTW

SEQ ID NO: 8429 - protein, 20 aa, Artificial Sequence
  Description of Artificial Sequence: Synthetic peptide
  MOD_RES (5)..(5): phosphorylated serine
SVMDSPKKLFFRKNWLRLTW

SEQ ID NO: 8430 - protein, 20 aa, Artificial Sequence
  Description of Artificial Sequence: Synthetic peptide
  MOD_RES (5)..(5): phosphorylated serine
SVRRSVLMKFFRKNWLRLTW

SEQ ID NO: 8431 - protein, 20 aa, Artificial Sequence
  Description of Artificial Sequence: Synthetic peptide
  MOD_RES (5)..(5): phosphorylated serine
SVRRSVLMYFFRKNWLRLTW

SEQ ID NO: 8432 - protein, 20 aa, Artificial Sequence
  Description of Artificial Sequence: Synthetic peptide
  MOD_RES (4)..(4): phosphorylated serine
SVRSLSLSLFFRKNWLRLTW

SEQ ID NO: 8433 - protein, 23 aa, Artificial Sequence
  Description of Artificial Sequence: Synthetic peptide
  MOD_RES (4)..(4): phosphorylated serine
SVYSGDFGNLEVFFRKNWLRLTW

SEQ ID NO: 8434 - protein, 20 aa, Artificial Sequence
  Description of Artificial Sequence: Synthetic peptide
  MOD_RES (4)..(4): phosphorylated serine
SVYSPVKKKFFRKNWLRLTW

SEQ ID NO: 8435 - protein, 20 aa, Artificial Sequence
  Description of Artificial Sequence: Synthetic peptide
  MOD_RES (4)..(4): phosphorylated serine
SVYSPVKKYFFRKNWLRLTW

SEQ ID NO: 8436 - protein, 20 aa, Artificial Sequence
  Description of Artificial Sequence: Synthetic peptide
  MOD_RES (1)..(1): phosphorylated serine
SYIEHIFEIFFRKNWLRLTW

SEQ ID NO: 8437 - protein, 21 aa, Artificial Sequence
  Description of Artificial Sequence: Synthetic peptide
  MOD_RES (4)..(4): phosphorylated serine
SYPSPVATSYFFRKNWLRLTW

SEQ ID NO: 8438 - protein, 20 aa, Artificial Sequence
  Description of Artificial Sequence: Synthetic peptide
  MOD_RES (1)..(1): phosphorylated serine
SYQKVIELFFFRKNWLRLTW

SEQ ID NO: 8439 - protein, 19 aa, Artificial Sequence
  Description of Artificial Sequence: Synthetic peptide
  MOD_RES (5)..(5): phosphorylated serine
TDKYSKMMFFRKNWLRLTW

SEQ ID NO: 8440 - protein, 20 aa, Artificial Sequence
  Description of Artificial Sequence: Synthetic peptide
  MOD_RES (4)..(4): phosphorylated serine
TEASPESMLFFRKNWLRLTW

SEQ ID NO: 8441 - protein, 31 aa, Artificial Sequence
  Description of Artificial Sequence: Synthetic polypeptide
  MOD_RES (18)..(18): phosphorylated serine
  MOD_RES (19)..(19): phosphorylated serine
THKGEIRGASTPFQFRASSPFFRKNWLRLTW

SEQ ID NO: 8442 - protein, 26 aa, Artificial Sequence
  Description of Artificial Sequence: Synthetic peptide
  MOD_RES (9)..(9): phosphorylated serine
TIGEKKEPSDKSVDSFFRKNWLRLTW

SEQ ID NO: 8443 - protein, 29 aa, Artificial Sequence
  Description of Artificial Sequence: Synthetic peptide
  MOD_RES (15)..(15): phosphorylated serine
TKDKYMASRGQKAKSMEGFFRKNWLRLTW

SEQ ID NO: 8444 - protein, 25 aa, Artificial Sequence
  Description of Artificial Sequence: Synthetic peptide
  MOD_RES (3)..(3): phosphorylated serine
TKSVKALSSLHGDDFFRKNWLRLTW

SEQ ID NO: 8445 - protein, 26 aa, Artificial Sequence
  Description of Artificial Sequence: Synthetic peptide
  MOD_RES (3)..(3): phosphorylated serine
TKSVKALSSLHGDDQFFRKNWLRLTW

SEQ ID NO: 8446 - protein, 27 aa, Artificial Sequence
  Description of Artificial Sequence: Synthetic peptide
  MOD_RES (3)..(3): phosphorylated serine
TKSVKALSSLHGDDQDFFRKNWLRLTW

SEQ ID NO: 8447 - protein, 22 aa, Artificial Sequence
  Description of Artificial Sequence: Synthetic peptide
  MOD_RES (4)..(4): phosphorylated serine
TLASPSVFKSTFFRKNWLRLTW

SEQ ID NO: 8448 - protein, 22 aa, Artificial Sequence
  Description of Artificial Sequence: Synthetic peptide
  MOD_RES (4)..(4): phosphorylated serine
TLASPSVFKSVFFRKNWLRLTW

SEQ ID NO: 8449 - protein, 20 aa, Artificial Sequence
  Description of Artificial Sequence: Synthetic peptide
  MOD_RES (5)..(5): phosphorylated serine
TLLASPMLKFFRKNWLRLTW

SEQ ID NO: 8450 - protein, 20 aa, Artificial Sequence
  Description of Artificial Sequence: Synthetic peptide
  MOD_RES (8)..(8): phosphorylated serine
TLMERTVSLFFRKNWLRLTW

SEQ ID NO: 8451 - protein, 20 aa, Artificial Sequence
  Description of Artificial Sequence: Synthetic peptide
  MOD_RES (4)..(4): phosphorylated serine
TLSSPPPGLFFRKNWLRLTW

SEQ ID NO: 8452 - protein, 21 aa, Artificial Sequence
  Description of Artificial Sequence: Synthetic peptide
  MOD_RES (4)..(4): phosphorylated serine
TMASPGKDNYFFRKNWLRLTW

SEQ ID NO: 8453 - protein, 22 aa, Artificial Sequence
  Description of Artificial Sequence: Synthetic peptide
  MOD_RES (4)..(4): phosphorylated serine
TMASPSVFKSTFFRKNWLRLTW

SEQ ID NO: 8454 - protein, 22 aa, Artificial Sequence
  Description of Artificial Sequence: Synthetic peptide
  MOD_RES (4)..(4): phosphorylated serine
TMASPSVFKSVFFRKNWLRLTW

SEQ ID NO: 8455 - protein, 21 aa, Artificial Sequence
  Description of Artificial Sequence: Synthetic peptide
  MOD_RES (4)..(4): phosphorylated serine
TMDSPGKDNYFFRKNWLRLTW

SEQ ID NO: 8456 - protein, 21 aa, Artificial Sequence
  Description of Artificial Sequence: Synthetic peptide
  MOD_RES (4)..(4): phosphorylated serine
TMESPGKDNYFFRKNWLRLTW

SEQ ID NO: 8457 - protein, 20 aa, Artificial Sequence
  Description of Artificial Sequence: Synthetic peptide
  MOD_RES (4)..(4): phosphorylated serine
TMMSPSQFLFFRKNWLRLTW

SEQ ID NO: 8458 - protein, 21 aa, Artificial Sequence
  Description of Artificial Sequence: Synthetic peptide
  MOD_RES (9)..(9): phosphorylated serine
TPAQPQRRSFFFRKNWLRLTW

SEQ ID NO: 8459 - protein, 21 aa, Artificial Sequence
  Description of Artificial Sequence: Synthetic peptide
  MOD_RES (9)..(9): phosphorylated serine
TPAQPQRRSLFFRKNWLRLTW

SEQ ID NO: 8460 - protein, 21 aa, Artificial Sequence
  Description of Artificial Sequence: Synthetic peptide
  MOD_RES (9)..(9): phosphorylated serine
TPAQPQRRSMFFRKNWLRLTW

SEQ ID NO: 8461 - protein, 21 aa, Artificial Sequence
  Description of Artificial Sequence: Synthetic peptide
  MOD_RES (9)..(9): phosphorylated serine
TPAQPQRRSVFFRKNWLRLTW

SEQ ID NO: 8462 - protein, 30 aa, Artificial Sequence
  Description of Artificial Sequence: Synthetic polypeptide
  MOD_RES (12)..(12): phosphorylated serine
TPDPSKFFSQLSSEHGGDVFFRKNWLRLTW

SEQ ID NO: 8463 - protein, 31 aa, Artificial Sequence
  Description of Artificial Sequence: Synthetic polypeptide
  MOD_RES (1)..(1): phosphorylated threonine
TPDPSKFFSQLSSEHGGDVQFFRKNWLRLTW

SEQ ID NO: 8464 - protein, 22 aa, Artificial Sequence
  Description of Artificial Sequence: Synthetic peptide
  MOD_RES (4)..(4): phosphorylated serine
TPISPGRASGFFFRKNWLRLTW

SEQ ID NO: 8465 - protein, 22 aa, Artificial Sequence
  Description of Artificial Sequence: Synthetic peptide
  MOD_RES (4)..(4): phosphorylated serine
TPISPGRASGLFFRKNWLRLTW

SEQ ID NO: 8466 - protein, 22 aa, Artificial Sequence
  Description of Artificial Sequence: Synthetic peptide
  MOD_RES (4)..(4): phosphorylated serine
TPISPGRASGMFFRKNWLRLTW

SEQ ID NO: 8467 - protein, 22 aa, Artificial Sequence
  Description of Artificial Sequence: Synthetic peptide
  MOD_RES (4)..(4): phosphorylated serine
TPISPGRASGVFFRKNWLRLTW

SEQ ID NO: 8468 - protein, 20 aa, Artificial Sequence
  Description of Artificial Sequence: Synthetic peptide
  MOD_RES (8)..(8): phosphorylated serine
TPMKKHLSLFFRKNWLRLTW

SEQ ID NO: 8469 - protein, 20 aa, Artificial Sequence
  Description of Artificial Sequence: Synthetic peptide
  MOD_RES (4)..(4): phosphorylated serine
TPRSPPLGFFFRKNWLRLTW

SEQ ID NO: 8470 - protein, 20 aa, Artificial Sequence
  Description of Artificial Sequence: Synthetic peptide
  MOD_RES (4)..(4): phosphorylated serine
TPRSPPLGLFFRKNWLRLTW

SEQ ID NO: 8471 - protein, 21 aa, Artificial Sequence
  Description of Artificial Sequence: Synthetic peptide
  MOD_RES (4)..(4): phosphorylated serine
TPRSPPLGLFFFRKNWLRLTW

SEQ ID NO: 8472 - protein, 21 aa, Artificial Sequence
  Description of Artificial Sequence: Synthetic peptide
  MOD_RES (4)..(4): phosphorylated serine
TPRSPPLGLIFFRKNWLRLTW

SEQ ID NO: 8473 - protein, 21 aa, Artificial Sequence
  Description of Artificial Sequence: Synthetic peptide
  MOD_RES (4)..(4): phosphorylated serine
TPRSPPLGLLFFRKNWLRLTW

SEQ ID NO: 8474 - protein, 21 aa, Artificial Sequence
  Description of Artificial Sequence: Synthetic peptide
  MOD_RES (4)..(4): phosphorylated serine
TPRSPPLGLMFFRKNWLRLTW

SEQ ID NO: 8475 - protein, 21 aa, Artificial Sequence
  Description of Artificial Sequence: Synthetic peptide
  MOD_RES (4)..(4): phosphorylated serine
TPRSPPLGLVFFRKNWLRLTW

SEQ ID NO: 8476 - protein, 20 aa, Artificial Sequence
  Description of Artificial Sequence: Synthetic peptide
  MOD_RES (4)..(4): phosphorylated serine
TPRSPPLGMFFRKNWLRLTW

SEQ ID NO: 8477 - protein, 20 aa, Artificial Sequence
  Description of Artificial Sequence: Synthetic peptide
  MOD_RES (4)..(4): phosphorylated serine
TPRSPPLGVFFRKNWLRLTW

SEQ ID NO: 8478 - protein, 20 aa, Artificial Sequence
  Description of Artificial Sequence: Synthetic peptide
  MOD_RES (7)..(7): phosphorylated serine
TQSSGKSSVFFRKNWLRLTW

SEQ ID NO: 8479 - protein, 20 aa, Artificial Sequence
  Description of Artificial Sequence: Synthetic peptide
  MOD_RES (4)..(4): phosphorylated threonine
TRKTPESFLFFRKNWLRLTW

SEQ ID NO: 8480 - protein, 22 aa, Artificial Sequence
  Description of Artificial Sequence: Synthetic peptide
  MOD_RES (4)..(4): phosphorylated serine
TRLSPAKIVLFFFRKNWLRLTW

SEQ ID NO: 8481 - protein, 22 aa, Artificial Sequence
  Description of Artificial Sequence: Synthetic peptide
  MOD_RES (4)..(4): phosphorylated serine
TRLSPAKIVLKFFRKNWLRLTW

SEQ ID NO: 8482 - protein, 22 aa, Artificial Sequence
  Description of Artificial Sequence: Synthetic peptide
  MOD_RES (4)..(4): phosphorylated serine
TRLSPAKIVLRFFRKNWLRLTW

SEQ ID NO: 8483 - protein, 22 aa, Artificial Sequence
  Description of Artificial Sequence: Synthetic peptide
  MOD_RES (4)..(4): phosphorylated serine
TRLSPAKIVLYFFRKNWLRLTW

SEQ ID NO: 8484 - protein, 21 aa, Artificial Sequence
  Description of Artificial Sequence: Synthetic peptide
  MOD_RES (4)..(4): phosphorylated serine
TSASPGKDNYFFRKNWLRLTW

SEQ ID NO: 8485 - protein, 21 aa, Artificial Sequence
  Description of Artificial Sequence: Synthetic peptide
  MOD_RES (4)..(4): phosphorylated serine
TSDSPGKDNYFFRKNWLRLTW

SEQ ID NO: 8486 - protein, 22 aa, Artificial Sequence
  Description of Artificial Sequence: Synthetic peptide
  MOD_RES (4)..(4): phosphorylated threonine
TSDTPDYLLKYFFRKNWLRLTW

SEQ ID NO: 8487 - protein, 21 aa, Artificial Sequence
  Description of Artificial Sequence: Synthetic peptide
  MOD_RES (4)..(4): phosphorylated serine
TSESPGKDNYFFRKNWLRLTW

SEQ ID NO: 8488 - protein, 22 aa, Artificial Sequence
  Description of Artificial Sequence: Synthetic peptide
  MOD_RES (4)..(4): phosphorylated threonine
TSETPDYLLKYFFRKNWLRLTW

SEQ ID NO: 8489 - protein, 21 aa, Artificial Sequence
  Description of Artificial Sequence: Synthetic peptide
  MOD_RES (4)..(4): phosphorylated serine
TTASPGKDNYFFRKNWLRLTW

SEQ ID NO: 8490 - protein, 21 aa, Artificial Sequence
  Description of Artificial Sequence: Synthetic peptide
  MOD_RES (4)..(4): phosphorylated serine
TTDSPGKDNYFFRKNWLRLTW

SEQ ID NO: 8491 - protein, 22 aa, Artificial Sequence
  Description of Artificial Sequence: Synthetic peptide
  MOD_RES (4)..(4): phosphorylated threonine
TTDTPDYLLKYFFRKNWLRLTW

SEQ ID NO: 8492 - protein, 21 aa, Artificial Sequence
  Description of Artificial Sequence: Synthetic peptide
  MOD_RES (4)..(4): phosphorylated serine
TTESPGKDNYFFRKNWLRLTW

SEQ ID NO: 8493 - protein, 22 aa, Artificial Sequence
  Description of Artificial Sequence: Synthetic peptide
  MOD_RES (4)..(4): phosphorylated threonine
TTETPDYLLKYFFRKNWLRLTW

SEQ ID NO: 8494 - protein, 24 aa, Artificial Sequence
  Description of Artificial Sequence: Synthetic peptide
  MOD_RES (4)..(4): phosphorylated serine
TTKSVKALSSLHGFFRKNWLRLTW

SEQ ID NO: 8495 - protein, 26 aa, Artificial Sequence
  Description of Artificial Sequence: Synthetic peptide
  MOD_RES (4)..(4): phosphorylated serine
TTKSVKALSSLHGDDFFRKNWLRLTW

SEQ ID NO: 8496 - protein, 27 aa, Artificial Sequence
  Description of Artificial Sequence: Synthetic peptide
  MOD_RES (4)..(4): phosphorylated serine
TTKSVKALSSLHGDDQFFRKNWLRLTW

SEQ ID NO: 8497 - protein, 28 aa, Artificial Sequence
  Description of Artificial Sequence: Synthetic peptide
  MOD_RES (4)..(4): phosphorylated serine
TTKSVKALSSLHGDDQDFFRKNWLRLTW

SEQ ID NO: 8498 - protein, 29 aa, Artificial Sequence
  Description of Artificial Sequence: Synthetic peptide
  MOD_RES (4)..(4): phosphorylated serine
TTKSVKALSSLHGDDQDSFFRKNWLRLTW

SEQ ID NO: 8499 - protein, 31 aa, Artificial Sequence
  Description of Artificial Sequence: Synthetic polypeptide
  MOD_RES (4)..(4): phosphorylated serine
  MOD_RES (18)..(18): phosphorylated serine
TTKSVKALSSLHGDDQDSEDFFRKNWLRLTW

SEQ ID NO: 8500 - protein, 31 aa, Artificial Sequence; identical to SEQ ID NO: 8499
  Description of Artificial Sequence: Synthetic polypeptide
  MOD_RES (18)..(18): phosphorylated serine

SEQ ID NO: 8501 - protein, 32 aa, Artificial Sequence
  Description of Artificial Sequence: Synthetic polypeptide
  MOD_RES (4)..(4): phosphorylated serine
  MOD_RES (18)..(18): phosphorylated serine
TTKSVKALSSLHGDDQDSEDEFFRKNWLRLTW

SEQ ID NO: 8502 - protein, 32 aa, Artificial Sequence; identical to SEQ ID NO: 8501
  Description of Artificial Sequence: Synthetic polypeptide
  MOD_RES (18)..(18): phosphorylated serine

SEQ ID NO: 8503 - protein, 21 aa, Artificial Sequence
  Description of Artificial Sequence: Synthetic peptide
  MOD_RES (4)..(4): phosphorylated serine
TVFSPTLPAAFFRKNWLRLTW

SEQ ID NO: 8504 - protein, 22 aa, Artificial Sequence
  Description of Artificial Sequence: Synthetic peptide
  MOD_RES (4)..(4): phosphorylated serine
TVMSNSSVIHLFFRKNWLRLTW

SEQ ID NO: 8505 - protein, 18 aa, Artificial Sequence
  Description of Artificial Sequence: Synthetic peptide
  MOD_RES (6)..(6): phosphorylated serine
VAKRLSLFFRKNWLRLTW

SEQ ID NO: 8506 - protein, 38 aa, Artificial Sequence
  Description of Artificial Sequence: Synthetic polypeptide
  MOD_RES (13)..(13): phosphorylated serine
VAMPVKKSPRRSSSDEQGLSYSSLKNVFFRKNWLRLTW

SEQ ID NO: 8507 - protein, 21 aa, Artificial Sequence
  Description of Artificial Sequence: Synthetic peptide
  MOD_RES (4)..(4): phosphorylated serine
VIDSQELSKVFFRKNWLRLTW

SEQ ID NO: 8508 - protein, 20 aa, Artificial Sequence
  Description of Artificial Sequence: Synthetic peptide
  MOD_RES (4)..(4): phosphorylated serine
VLDSPASKKFFRKNWLRLTW

SEQ ID NO: 8509 - protein, 21 aa, Artificial Sequence
  Description of Artificial Sequence: Synthetic peptide
  MOD_RES (6)..(6): phosphorylated serine
VLFPESPARAFFRKNWLRLTW

SEQ ID NO: 8510 - protein, 21 aa, Artificial Sequence
  Description of Artificial Sequence: Synthetic peptide
  MOD_RES (5)..(5): phosphorylated threonine
VLFRTPLASVFFRKNWLRLTW

SEQ ID NO: 8511 - protein, 20 aa, Artificial Sequence
  Description of Artificial Sequence: Synthetic peptide
  MOD_RES (4)..(4): phosphorylated serine
VLFSSPPQMFFRKNWLRLTW

SEQ ID NO: 8512 - protein, 20 aa, Artificial Sequence
  Description of Artificial Sequence: Synthetic peptide
  MOD_RES (5)..(5): phosphorylated serine
VLFSSPPQMFFRKNWLRLTW

SEQ ID NO: 8513 - protein, 20 aa, Artificial Sequence
  Description of Artificial Sequence: Synthetic peptide
  MOD_RES (8)..(8): phosphorylated serine
VLIENVASLFFRKNWLRLTW

SEQ ID NO: 8514 - protein, 20 aa, Artificial Sequence
  Description of Artificial Sequence: Synthetic peptide
  MOD_RES (5)..(5): phosphorylated serine
VLIGSPKKVFFRKNWLRLTW

SEQ ID NO: 8515 - protein, 20 aa, Artificial Sequence
  Description of Artificial Sequence: Synthetic peptide
  MOD_RES (5)..(5): phosphorylated serine
VLIGSPKKYFFRKNWLRLTW

SEQ ID NO: 8516 - protein, 21 aa, Artificial Sequence
  Description of Artificial Sequence: Synthetic peptide
  MOD_RES (5)..(5): phosphorylated serine
VLKGSRSSELFFRKNWLRLTW

SEQ ID NO: 8517 - protein, 21 aa, Artificial Sequence
  Description of Artificial Sequence: Synthetic peptide
  MOD_RES (5)..(5): phosphorylated serine
VLKGSRSSEVFFRKNWLRLTW

SEQ ID NO: 8518 - protein, 23 aa, Artificial Sequence
  Description of Artificial Sequence: Synthetic peptide
  MOD_RES (7)..(7): phosphorylated serine
  MOD_RES (8)..(8): phosphorylated serine
VLKSRKSSVTEEFFRKNWLRLTW

SEQ ID NO: 8519 - protein, 21 aa, Artificial Sequence
  Description of Artificial Sequence: Synthetic peptide
  MOD_RES (8)..(8): phosphorylated serine
VLKVMIGSPKFFRKNWLRLTW

SEQ ID NO: 8520 - protein, 22 aa, Artificial Sequence
  Description of Artificial Sequence: Synthetic peptide
  MOD_RES (8)..(8): phosphorylated serine
VLKVMIGSPKKFFRKNWLRLTW

SEQ ID NO: 8521 - protein, 23 aa, Artificial Sequence
  Description of Artificial Sequence: Synthetic peptide
  MOD_RES (8)..(8): phosphorylated serine
VLKVMIGSPKKKFFRKNWLRLTW

SEQ ID NO: 8522 - protein, 20 aa, Artificial Sequence
  Description of Artificial Sequence: Synthetic peptide
  MOD_RES (4)..(4): phosphorylated serine
VLLSPVPELFFRKNWLRLTW

SEQ ID NO: 8523 - protein, 20 aa, Artificial Sequence
  Description of Artificial Sequence: Synthetic peptide
  MOD_RES (4)..(4): phosphorylated serine
VLLSPVPEVFFRKNWLRLTW

SEQ ID NO: 8524 - protein, 21 aa, Artificial Sequence
  Description of Artificial Sequence: Synthetic peptide
  MISC_FEATURE (5)..(7): at least one serine residue in the amino acid sequence SPS is phosphorylated
VLMKSPSPALFFRKNWLRLTW

SEQ ID NO: 8525 - protein, 21 aa, Artificial Sequence
  Description of Artificial Sequence: Synthetic peptide
  MISC_FEATURE (5)..(7): at least one serine residue in the amino acid sequence SPS is phosphorylated
VLMKSPSPAVFFRKNWLRLTW

SEQ ID NO: 8526 - protein, 20 aa, Artificial Sequence
  Description of Artificial Sequence: Synthetic peptide
  MOD_RES (4)..(4): phosphorylated threonine
VLQTPPYVKFFRKNWLRLTW

SEQ ID NO: 8527 - protein, 21 aa, Artificial Sequence
  Description of Artificial Sequence: Synthetic peptide
  MOD_RES (4)..(4): phosphorylated threonine
VLQTPPYVKKFFRKNWLRLTW

SEQ ID NO: 8528 - protein, 21 aa, Artificial Sequence
  Description of Artificial Sequence: Synthetic peptide
  MOD_RES (4)..(4): phosphorylated threonine
VLQTPPYVKYFFRKNWLRLTW

SEQ ID NO: 8529 - protein, 20 aa, Artificial Sequence
  Description of Artificial Sequence: Synthetic peptide
  MOD_RES (8)..(8): phosphorylated serine
VLSDVIPSIFFRKNWLRLTW

SEQ ID NO: 8530 - protein, 21 aa, Artificial Sequence
  Description of Artificial Sequence: Synthetic peptide
  MOD_RES (6)..(6): phosphorylated threonine
VLSSLTPAKVFFRKNWLRLTW

SEQ ID NO: 8531 - protein, 20 aa, Artificial Sequence
  Description of Artificial Sequence: Synthetic peptide
  MOD_RES (8)..(8): phosphorylated serine
VLVVDTPSIFFRKNWLRLTW

SEQ ID NO: 8532 - protein, 20 aa, Artificial Sequence
  Description of Artificial Sequence: Synthetic peptide
  MOD_RES (4)..(4): phosphorylated serine
VLYSPQMALFFRKNWLRLTW

SEQ ID NO: 8533 - protein, 21 aa, Artificial Sequence
  Description of Artificial Sequence: Synthetic peptide
  MOD_RES (5)..(5): phosphorylated threonine
VMFRTPLASVFFRKNWLRLTW

SEQ ID NO: 8534 - protein, 19 aa, Artificial Sequence
  Description of Artificial Sequence: Synthetic peptide
  MOD_RES (5)..(5): phosphorylated serine
VMIGSKKVFFRKNWLRLTW

SEQ ID NO: 8535 - protein, 20 aa, Artificial Sequence
  Description of Artificial Sequence: Synthetic peptide
  MOD_RES (5)..(5): phosphorylated serine
VMIGSPKKVFFRKNWLRLTW

SEQ ID NO: 8536 - protein, 20 aa, Artificial Sequence
  Description of Artificial Sequence: Synthetic peptide
  MOD_RES (5)..(5): phosphorylated serine
VMIGSPKKYFFRKNWLRLTW

SEQ ID NO: 8537 - protein, 21 aa, Artificial Sequence
  Description of Artificial Sequence: Synthetic peptide
  MOD_RES (8)..(8): phosphorylated serine
VMKVMIGSPKFFRKNWLRLTW

SEQ ID NO: 8538 - protein, 22 aa, Artificial Sequence
  Description of Artificial Sequence: Synthetic peptide
  MOD_RES (8)..(8): phosphorylated serine
VMKVMIGSPKKFFRKNWLRLTW

SEQ ID NO: 8539 - protein, 23 aa, Artificial Sequence
  Description of Artificial Sequence: Synthetic peptide
  MOD_RES (8)..(8): phosphorylated serine
VMKVMIGSPKKKFFRKNWLRLTW

SEQ ID NO: 8540 - protein, 23 aa, Artificial Sequence
  Description of Artificial Sequence: Synthetic peptide
  MOD_RES (8)..(8): phosphorylated serine
VMKVMIGSPKKYFFRKNWLRLTW

SEQ ID NO: 8541 - protein, 20 aa, Artificial Sequence
  Description of Artificial Sequence: Synthetic peptide
  MOD_RES (4)..(4): phosphorylated serine
VMLSPVPELFFRKNWLRLTW

SEQ ID NO: 8542 - protein, 20 aa, Artificial Sequence
  Description of Artificial Sequence: Synthetic peptide
  MOD_RES (4)..(4): phosphorylated serine
VMLSPVPEVFFRKNWLRLTW

SEQ ID NO: 8543 - protein, 20 aa, Artificial Sequence
  Description of Artificial Sequence: Synthetic peptide
  MOD_RES (4)..(4): phosphorylated threonine
VMQTPPYVKFFRKNWLRLTW

SEQ ID NO: 8544 - protein, 21 aa, Artificial Sequence
  Description of Artificial Sequence: Synthetic peptide
  MOD_RES (4)..(4): phosphorylated threonine
VMQTPPYVKKFFRKNWLRLTW

SEQ ID NO: 8545 - protein, 24 aa, Artificial Sequence
  Description of Artificial Sequence: Synthetic peptide
  MOD_RES (10)..(10): phosphorylated serine
VPHHGFEDWSQIRFFRKNWLRLTW

SEQ ID NO: 8546 - protein, 21 aa, Artificial Sequence
  Description of Artificial Sequence: Synthetic peptide
  MOD_RES (9)..(9): phosphorylated serine
VPKSGRSSSLFFRKNWLRLTW

SEQ ID NO: 8547 - protein, 20 aa, Artificial Sequence
  Description of Artificial Sequence: Synthetic peptide
  MOD_RES (4)..(4): phosphorylated serine
VPKSPAFALFFRKNWLRLTW

SEQ ID NO: 8548 - protein, 20 aa, Artificial Sequence
  Description of Artificial Sequence: Synthetic peptide
  MOD_RES (8)..(8): phosphorylated serine
VPLIRKKSLFFRKNWLRLTW

SEQ ID NO: 8549 - protein, 31 aa, Artificial Sequence
  Description of Artificial Sequence: Synthetic polypeptide
  MOD_RES (12)..(12): phosphorylated serine
VPNAPPAYEKLSAEQSPPPYFFRKNWLRLTW

SEQ ID NO: 8550 - protein, 21 aa, Artificial Sequence
  Description of Artificial Sequence: Synthetic peptide
  MOD_RES (9)..(9): phosphorylated serine
VPREVLRLSFFFRKNWLRLTW

SEQ ID NO: 8551 - protein, 21 aa, Artificial Sequence
  Description of Artificial Sequence: Synthetic peptide
  MOD_RES (9)..(9): phosphorylated serine
VPREVLRLSLFFRKNWLRLTW

SEQ ID NO: 8552 - protein, 21 aa, Artificial Sequence
  Description of Artificial Sequence: Synthetic peptide
  MOD_RES (9)..(9): phosphorylated serine
VPREVLRLSMFFRKNWLRLTW

SEQ ID NO: 8553 - protein, 21 aa, Artificial Sequence
  Description of Artificial Sequence: Synthetic peptide
  MOD_RES (9)..(9): phosphorylated serine
VPREVLRLSVFFRKNWLRLTW

SEQ ID NO: 8554 - protein, 21 aa, Artificial Sequence
  Description of Artificial Sequence: Synthetic peptide
  MOD_RES (8)..(8): phosphorylated serine
VPRPERRSSLFFRKNWLRLTW

SEQ ID NO: 8555 - protein, 24 aa, Artificial Sequence
  Description of Artificial Sequence: Synthetic peptide
  MOD_RES (4)..(4): phosphorylated serine
VPRSPKHAHSSSFFFRKNWLRLTW

SEQ ID NO: 8556 - protein, 24 aa, Artificial Sequence
  Description of Artificial Sequence: Synthetic peptide
  MOD_RES (4)..(4): phosphorylated serine
VPRSPKHAHSSSLFFRKNWLRLTW

SEQ ID NO: 8557 - protein, 24 aa, Artificial Sequence
  Description of Artificial Sequence: Synthetic peptide
  MOD_RES (4)..(4): phosphorylated serine
VPRSPKHAHSSSMFFRKNWLRLTW

SEQ ID NO: 8558 - protein, 24 aa, Artificial Sequence
  Description of Artificial Sequence: Synthetic peptide
  MOD_RES (4)..(4): phosphorylated serine
VPRSPKHAHSSSVFFRKNWLRLTW

SEQ ID NO: 8559 - protein, 20 aa, Artificial Sequence
  Description of Artificial Sequence: Synthetic peptide
  MOD_RES (4)..(4): phosphorylated threonine
VPSTPKSSLFFRKNWLRLTW

SEQ ID NO: 8560 - protein, 20 aa, Artificial Sequence
  Description of Artificial Sequence: Synthetic peptide
  MOD_RES (4)..(4): phosphorylated serine
VPTSPKSSLFFRKNWLRLTW

SEQ ID NO: 8561 - protein, 20 aa, Artificial Sequence
  Description of Artificial Sequence: Synthetic peptide
  MOD_RES (4)..(4): phosphorylated serine
VPVSPGQQLFFRKNWLRLTW

SEQ ID NO: 8562 - protein, 20 aa, Artificial Sequence
  Description of Artificial Sequence: Synthetic peptide
  MOD_RES (4)..(4): phosphorylated serine
VRASKDLAQFFRKNWLRLTW

SEQ ID NO: 8563 - protein, 28 aa, Artificial Sequence
  Description of Artificial Sequence: Synthetic peptide
  MOD_RES (4)..(4): phosphorylated serine
VRQSVTSFPDADAFHHQFFRKNWLRLTW

SEQ ID NO: 8564 - protein, 23 aa, Artificial Sequence
  Description of Artificial Sequence: Synthetic peptide
  MOD_RES (8)..(8): phosphorylated serine
VSKVMIGSPKKVFFRKNWLRLTW

SEQ ID NO: 8565 - protein, 23 aa, Artificial Sequence
  Description of Artificial Sequence: Synthetic peptide
  MOD_RES (8)..(8): phosphorylated serine
VSKVMIGSPKKYFFRKNWLRLTW

SEQ ID NO: 8566 - protein, 21 aa, Artificial Sequence
  Description of Artificial Sequence: Synthetic peptide
  MOD_RES (4)..(4): phosphorylated threonine
VTQTPPYVKKFFRKNWLRLTW

SEQ ID NO: 8567 - protein, 21 aa, Artificial Sequence
  Description of Artificial Sequence: Synthetic peptide
  MOD_RES (4)..(4): phosphorylated threonine
VTQTPPYVKYFFRKNWLRLTW

SEQ ID NO: 8568 - protein, 21 aa, Artificial Sequence
  Description of Artificial Sequence: Synthetic peptide
  MOD_RES (4)..(4): phosphorylated serine
VVDSPGQEVLFFRKNWLRLTW

SEQ ID NO: 8569 - protein, 20 aa, Artificial Sequence
  Description of Artificial Sequence: Synthetic peptide
  MOD_RES (4)..(4): phosphorylated tyrosine
VYTYIQSRFFFRKNWLRLTW

SEQ ID NO: 8570 - protein, 23 aa, Artificial Sequence
  Description of Artificial Sequence: Synthetic peptide
  MOD_RES (5)..(5): phosphorylated serine
WTHLSSKEVDPSFFRKNWLRLTW

SEQ ID NO: 8571 - protein, 25 aa, Artificial Sequence
  Description of Artificial Sequence: Synthetic peptide
  MOD_RES (5)..(5): phosphorylated serine
WTHLSSKEVDPSTGFFRKNWLRLTW

SEQ ID NO: 8572 - protein, 20 aa, Artificial Sequence
  Description of Artificial Sequence: Synthetic peptide
  MOD_RES (4)..(4): phosphorylated serine
YARSVHEEFFFRKNWLRLTW

SEQ ID NO: 8573 - protein, 20 aa, Artificial Sequence
  Description of Artificial Sequence: Synthetic peptide
  MOD_RES (8)..(8): phosphorylated serine
YAVPRRGSLFFRKNWLRLTW

SEQ ID NO: 8574 - protein, 20 aa, Artificial Sequence
  Description of Artificial Sequence: Synthetic peptide
  MOD_RES (8)..(8): phosphorylated tyrosine
YAYDGKDYIFFRKNWLRLTW

SEQ ID NO: 8575 - protein, 19 aa, Artificial Sequence
  Description of Artificial Sequence: Synthetic peptide
  MOD_RES (4)..(4): phosphorylated serine
YEGSPIKVFFRKNWLRLTW

SEQ ID NO: 8576 - protein, 23 aa, Artificial Sequence
  Description of Artificial Sequence: Synthetic peptide
  MOD_RES (5)..(5): phosphorylated serine
YEKLSAEQSPPPFFRKNWLRLTW

SEQ ID NO: 8577 - protein, 19 aa, Artificial Sequence
  Description of Artificial Sequence: Synthetic peptide
  MOD_RES (3)..(3): phosphorylated serine
YFSPFRPYFFRKNWLRLTW

SEQ ID NO: 8578 - protein, 17 aa, Artificial Sequence
  Description of Artificial Sequence: Synthetic peptide
  MOD_RES (1)..(1): phosphorylated tyrosine
YIQSRFFFRKNWLRLTW

SEQ ID NO: 8579 - protein, 20 aa, Artificial Sequence
  Description of Artificial Sequence: Synthetic peptide
  MOD_RES (4)..(4): phosphorylated serine
YLASLEKKLFFRKNWLRLTW

SEQ ID NO: 8580 - protein, 20 aa, Artificial Sequence
  Description of Artificial Sequence: Synthetic peptide
  MOD_RES (4)..(4): phosphorylated serine
YLDSGIHSGFFRKNWLRLTW

SEQ ID NO: 8581 - protein, 21 aa, Artificial Sequence
  Description of Artificial Sequence: Synthetic peptide
  MOD_RES (4)..(4): phosphorylated serine
  MOD_RES (8)..(8): phosphorylated serine
YLDSGIHSGAFFRKNWLRLTW

SEQ ID NO: 8582 - protein, 21 aa, Artificial Sequence
  Description of Artificial Sequence: Synthetic peptide
  MOD_RES (4)..(4): phosphorylated serine
YLDSGIHSGAFFRKNWLRLTW

SEQ ID NO: 8583 - protein, 21 aa, Artificial Sequence
  Description of Artificial Sequence: Synthetic peptide
  MOD_RES (4)..(4): phosphorylated serine
  MOD_RES (8)..(8): phosphorylated serine
YLDSGIHSGVFFRKNWLRLTW

SEQ ID NO: 8584 - protein, 21 aa, Artificial Sequence
  Description of Artificial Sequence: Synthetic peptide
  MOD_RES (4)..(4): phosphorylated serine
YLDSGIHSGVFFRKNWLRLTW

SEQ ID NO: 8585 - protein, 19 aa, Artificial Sequence
  Description of Artificial Sequence: Synthetic peptide
  MOD_RES (1)..(1): phosphorylated tyrosine
YLGLDVPVFFRKNWLRLTW

SEQ ID NO: 8586 - protein, 22 aa, Artificial Sequence
  Description of Artificial Sequence: Synthetic peptide
  MOD_RES (4)..(4): phosphorylated serine
YLGSISTLVTLFFRKNWLRLTW

SEQ ID NO: 8587 - protein, 20 aa, Artificial Sequence
  Description of Artificial Sequence: Synthetic peptide
  MOD_RES (5)..(5): phosphorylated serine
YLIHSPMSLFFRKNWLRLTW

SEQ ID NO: 8588 - protein, 20 aa, Artificial Sequence
  Description of Artificial Sequence: Synthetic peptide
  MOD_RES (4)..(4): phosphorylated serine
YLLSPLNTLFFRKNWLRLTW

SEQ ID NO: 8589 - protein, 22 aa, Artificial Sequence
  Description of Artificial Sequence: Synthetic peptide
  MOD_RES (4)..(4): phosphorylated serine
YLLSPTKLPSIFFRKNWLRLTW

SEQ ID NO: 8590 - protein, 22 aa, Artificial Sequence
  Description of Artificial Sequence: Synthetic peptide
  MOD_RES (4)..(4): phosphorylated serine
YLLSPTKLPSVFFRKNWLRLTW

SEQ ID NO: 8591 - protein, 20 aa, Artificial Sequence
  Description of Artificial Sequence: Synthetic peptide
  MOD_RES (1)..(1): phosphorylated tyrosine
YLQSRYYRAFFRKNWLRLTW

SEQ ID NO: 8592 - protein, 20 aa, Artificial Sequence
  Description of Artificial Sequence: Synthetic peptide
  MOD_RES (4)..(4): phosphorylated serine
YLQSRYYRAFFRKNWLRLTW

SEQ ID NO: 8593 - protein, 22 aa, Artificial Sequence
  Description of Artificial Sequence: Synthetic peptide
  MOD_RES (5)..(5): phosphorylated serine
YLSDSDTEAKLFFRKNWLRLTW

SEQ ID NO: 8594 - protein, 21 aa, Artificial Sequence
  Description of Artificial Sequence: Synthetic peptide
  MOD_RES (4)..(4): phosphorylated serine
  MOD_RES (8)..(8): phosphorylated serine
YMDSGIHSGAFFRKNWLRLTW

SEQ ID NO: 8595 - protein, 21 aa, Artificial Sequence
  Description of Artificial Sequence: Synthetic peptide
  MOD_RES (4)..(4): phosphorylated serine
YMDSGIHSGAFFRKNWLRLTW

SEQ ID NO: 8596 - protein, 21 aa, Artificial Sequence
  Description of Artificial Sequence: Synthetic peptide
  MOD_RES (4)..(4): phosphorylated serine
  MOD_RES (8)..(8): phosphorylated serine
YMDSGIHSGVFFRKNWLRLTW

SEQ ID NO: 8597 - protein, 21 aa, Artificial Sequence
  Description of Artificial Sequence: Synthetic peptide
  MOD_RES (4)..(4): phosphorylated serine
YMDSGIHSGVFFRKNWLRLTW

SEQ ID NO: 8598 - protein, 21 aa, Artificial Sequence
  Description of Artificial Sequence: Synthetic peptide
  MOD_RES (6)..(6): phosphorylated serine
YPDPHSPFAVFFRKNWLRLTW

SEQ ID NO: 8599 - protein, 20 aa, Artificial Sequence
  Description of Artificial Sequence: Synthetic peptide
  MOD_RES (7)..(7): phosphorylated serine
YPGGRRSSLFFRKNWLRLTW

SEQ ID NO: 8600 - protein, 22 aa, Artificial Sequence
  Description of Artificial Sequence: Synthetic peptide
  MOD_RES (4)..(4): phosphorylated serine
YPLSPAKVNQYFFRKNWLRLTW

SEQ ID NO: 8601 - protein, 22 aa, Artificial Sequence
  Description of Artificial Sequence: Synthetic peptide
  MOD_RES (4)..(4): phosphorylated serine
YPLSPTKISEYFFRKNWLRLTW

SEQ ID NO: 8602 - protein, 22 aa, Artificial Sequence
  Description of Artificial Sequence: Synthetic peptide
  MOD_RES (4)..(4): phosphorylated serine
YPLSPTKISQYFFRKNWLRLTW

SEQ ID NO: 8603 - protein, 23 aa, Artificial Sequence
  Description of Artificial Sequence: Synthetic peptide
  MOD_RES (4)..(4): phosphorylated serine
YPRSEDEVEGVMFFRKNWLRLTW

SEQ ID NO: 8604 - protein, 22 aa, Artificial Sequence
  Description of Artificial Sequence: Synthetic peptide
  MOD_RES (4)..(4): phosphorylated serine
YPRSFDEVEGFFFRKNWLRLTW

SEQ ID NO: 8605 - protein, 22 aa, Artificial Sequence
  Description of Artificial Sequence: Synthetic peptide
  MOD_RES (4)..(4): phosphorylated serine
YPRSFDEVEGLFFRKNWLRLTW

SEQ ID NO: 8606 - protein, 22 aa, Artificial Sequence
  Description of Artificial Sequence: Synthetic peptide
  MOD_RES (4)..(4): phosphorylated serine
YPRSFDEVEGMFFRKNWLRLTW

SEQ ID NO: 8607 - protein, 22 aa, Artificial Sequence
  Description of Artificial Sequence: Synthetic peptide
  MOD_RES (4)..(4): phosphorylated serine
YPRSFDEVEGVFFRKNWLRLTW

SEQ ID NO: 8608 - protein, 23 aa, Artificial Sequence
  Description of Artificial Sequence: Synthetic peptide
  MOD_RES (4)..(4): phosphorylated serine
YPRSFDEVEGVFFFRKNWLRLTW

SEQ ID NO: 8609 - protein, 23 aa, Artificial Sequence
  Description of Artificial Sequence: Synthetic peptide
  MOD_RES (4)..(4): phosphorylated serine
YPRSFDEVEGVLFFRKNWLRLTW

SEQ ID NO: 8610 - protein, 23 aa, Artificial Sequence
  Description of Artificial Sequence: Synthetic peptide
  MOD_RES (4)..(4): phosphorylated serine
YPRSFDEVEGVMFFRKNWLRLTW

SEQ ID NO: 8611 - protein, 23 aa, Artificial Sequence
  Description of Artificial Sequence: Synthetic peptide
  MOD_RES (4)..(4): phosphorylated serine
YPRSFDEVEGVVFFRKNWLRLTW

SEQ ID NO: 8612 - protein, 20 aa, Artificial Sequence
  Description of Artificial Sequence: Synthetic peptide
  MOD_RES (7)..(7): phosphorylated serine
YPSFRRSSLFFRKNWLRLTW

SEQ ID NO: 8613 - protein, 20 aa, Artificial Sequence
  Description of Artificial Sequence: Synthetic peptide
  MOD_RES (4)..(4): phosphorylated serine
YPSSPRKALFFRKNWLRLTW

SEQ ID NO: 8614 - protein, 19 aa, Artificial Sequence
  Description of Artificial Sequence: Synthetic peptide
  MOD_RES (4)..(4): phosphorylated serine
YPSSPRKFFFRKNWLRLTW

SEQ ID NO: 8615 - protein, 19 aa, Artificial Sequence
  Description of Artificial Sequence: Synthetic peptide
  MOD_RES (4)..(4): phosphorylated serine
YPSSPRKLFFRKNWLRLTW

SEQ ID NO: 8616 - protein, 19 aa, Artificial Sequence
  Description of Artificial Sequence: Synthetic peptide
  MOD_RES (4)..(4): phosphorylated serine
YPSSPRKMFFRKNWLRLTW

SEQ ID NO: 8617 - protein, 19 aa, Artificial Sequence
  Description of Artificial Sequence: Synthetic peptide
  MOD_RES (4)..(4): phosphorylated serine
YPSSPRKVFFRKNWLRLTW

SEQ ID NO: 8618 - protein, 21 aa, Artificial Sequence
  Description of Artificial Sequence: Synthetic peptide
  MOD_RES (6)..(6): phosphorylated serine
YPYEFSPVKMFFRKNWLRLTW

SEQ ID NO: 8619 - protein, 22 aa, Artificial Sequence
  Description of Artificial Sequence: Synthetic peptide
  MOD_RES (4)..(4): phosphorylated serine
YQLSPTKLPSIFFRKNWLRLTW

SEQ ID NO: 8620 - protein, 22 aa, Artificial Sequence
  Description of Artificial Sequence: Synthetic peptide
  MOD_RES (4)..(4): phosphorylated serine
YQLSPTKLPSVFFRKNWLRLTW

SEQ ID NO: 8621 - protein, 21 aa, Artificial Sequence
  Description of Artificial Sequence: Synthetic peptide
  MOD_RES (6)..(6): phosphorylated serine
YQRPFSPSAYFFRKNWLRLTW

SEQ ID NO: 8622 - protein, 22 aa, Artificial Sequence
  Description of Artificial Sequence: Synthetic peptide
  MOD_RES (4)..(4): phosphorylated serine
YQRSFDEVEGFFFRKNWLRLTW

SEQ ID NO: 8623 - protein, 22 aa, Artificial Sequence
  Description of Artificial Sequence: Synthetic peptide
  MOD_RES (4)..(4): phosphorylated serine
YQRSFDEVEGLFFRKNWLRLTW

SEQ ID NO: 8624 - protein, 22 aa, Artificial Sequence
  Description of Artificial Sequence: Synthetic peptide
  MOD_RES (4)..(4): phosphorylated serine
YQRSFDEVEGMFFRKNWLRLTW

SEQ ID NO: 8625 - protein, 22 aa, Artificial Sequence
  Description of Artificial Sequence: Synthetic peptide
  MOD_RES (4)..(4): phosphorylated serine
YQRSFDEVEGVFFRKNWLRLTW

SEQ ID NO: 8626 - protein, 23 aa, Artificial Sequence
  Description of Artificial Sequence: Synthetic peptide
  MOD_RES (4)..(4): phosphorylated serine
YQRSFDEVEGVFFFRKNWLRLTW

SEQ ID NO: 8627 - protein, 23 aa, Artificial Sequence
  Description of Artificial Sequence: Synthetic peptide
  MOD_RES (4)..(4): phosphorylated serine
YQRSFDEVEGVLFFRKNWLRLTW

SEQ ID NO: 8628 - protein, 23 aa, Artificial Sequence
  Description of Artificial Sequence: Synthetic peptide
  MOD_RES (4)..(4): phosphorylated serine
YQRSFDEVEGVMFFRKNWLRLTW

SEQ ID NO: 8629 - protein, 23 aa, Artificial Sequence
  Description of Artificial Sequence: Synthetic peptide
  MOD_RES (4)..(4): phosphorylated serine
YQRSFDEVEGVVFFRKNWLRLTW

SEQ ID NO: 8630 - protein, 20 aa, Artificial Sequence
  Description of Artificial Sequence: Synthetic peptide
  MOD_RES (4)..(4): phosphorylated serine
YRYSPQSFLFFRKNWLRLTW

SEQ ID NO: 8631 - protein, 20 aa, Artificial Sequence
  Description of Artificial Sequence: Synthetic peptide
  MOD_RES (5)..(5): phosphorylated threonine
YTAGTPYKVFFRKNWLRLTW

SEQ ID NO: 8632 - protein, 28 aa, Artificial Sequence
  Description of Artificial Sequence: Synthetic peptide
  MOD_RES (8)..(8): phosphorylated serine
YYTAGSSSPTHAKSAHVFFRKNWLRLTW

SEQ ID NO: 8633 - protein, 20 aa, Artificial Sequence
  Description of Artificial Sequence: Synthetic peptide
  MOD_RES (4)..(4): O-GlcNAcylated threonine
  MOD_RES (5)..(5): O-GlcNAcylated serine
ALTTSAHSVFFRKNLLRLTG

SEQ ID NO: 8634 - protein, 20 aa, Artificial Sequence
  Description of Artificial Sequence: Synthetic peptide
  MOD_RES (4)..(4): O-GlcNAcylated threonine
ALTTSAHSVFFRKNLLRLTG

SEQ ID NO: 8635 - protein, 20 aa, Artificial Sequence
  Description of Artificial Sequence: Synthetic peptide
  MOD_RES (5)..(5): O-GlcNAcylated serine
ALTTSAHSVFFRKNLLRLTG

SEQ ID NO: 8636 - protein, 21 aa, Artificial Sequence
  Description of Artificial Sequence: Synthetic peptide
  MISC_FEATURE (4)..(6): at least one of the serine or threonine residues is modified with O-GlcNAc
APPSTSAAALFFRKNLLRLTG

SEQ ID NO: 8637 - protein, 21 aa, Artificial Sequence
  Description of Artificial Sequence: Synthetic peptide
  MOD_RES (4)..(4): O-GlcNAcylated serine
APPSTSAAALFFRKNLLRLTG

SEQ ID NO: 8638 - protein, 21 aa, Artificial Sequence
  Description of Artificial Sequence: Synthetic peptide
  MOD_RES (4)..(4): O-GlcNAcylated serine
  MOD_RES (6)..(6): O-GlcNAcylated serine
APPSTSAAALFFRKNLLRLTG

SEQ ID NO: 8639 - protein, 21 aa, Artificial Sequence
  Description of Artificial Sequence: Synthetic peptide
  MOD_RES (5)..(5): O-GlcNAcylated threonine
APPSTSAAALFFRKNLLRLTG

SEQ ID NO: 8640 - protein, 21 aa, Artificial Sequence
  Description of Artificial Sequence: Synthetic peptide
  MOD_RES (6)..(6): O-GlcNAcylated serine
APPSTSAAALFFRKNLLRLTG

SEQ ID NO: 8641 - protein, 21 aa, Artificial Sequence
  Description of Artificial Sequence: Synthetic peptide
  MOD_RES (4)..(4): O-GlcNAcylated serine
  MOD_RES (5)..(5): O-GlcNAcylated threonine
APPSTSAAALFFRKNLLRLTG

SEQ ID NO: 8642 - protein, 21 aa, Artificial Sequence
  Description of Artificial Sequence: Synthetic peptide
  MOD_RES (5)..(5): O-GlcNAcylated threonine
  MOD_RES (6)..(6): O-GlcNAcylated serine
APPSTSAAALFFRKNLLRLTG

SEQ ID NO: 8643 - protein, 21 aa, Artificial Sequence
  Description of Artificial Sequence: Synthetic peptide
  MOD_RES (4)..(4): hexose-GlcNAcylated serine
APPSTSAAALFFRKNLLRLTG

SEQ ID NO: 8644 - protein, 21 aa, Artificial Sequence
  Description of Artificial Sequence: Synthetic peptide
  MOD_RES (5)..(5): hexose-GlcNAcylated threonine
APPSTSAAALFFRKNLLRLTG

SEQ ID NO: 8645 - protein, 21 aa, Artificial Sequence
  Description of Artificial Sequence: Synthetic peptide
  MOD_RES (6)..(6): hexose-GlcNAcylated serine
APPSTSAAALFFRKNLLRLTG

SEQ ID NO: 8646 - protein, 21 aa, Artificial Sequence
  Description of Artificial Sequence: Synthetic peptide
  MOD_RES (5)..(5): hexose-GlcNAcylated threonine
  MOD_RES (6)..(6): O-GlcNAcylated serine
APPSTSAAALFFRKNLLRLTG

SEQ ID NO: 8647 - protein, 21 aa, Artificial Sequence
  Description of Artificial Sequence: Synthetic peptide
  MOD_RES (4)..(4): hexose-GlcNAcylated serine
  MOD_RES (5)..(5): hexose-GlcNAcylated threonine
APPSTSAAALFFRKNLLRLTG

SEQ ID NO: 8648 - protein, 21 aa, Artificial Sequence
  Description of Artificial Sequence: Synthetic peptide
  MOD_RES (4)..(4): hexose-GlcNAcylated serine
  MOD_RES (6)..(6): hexose-GlcNAcylated serine
APPSTSAAALFFRKNLLRLTG

SEQ ID NO: 8649 - protein, 21 aa, Artificial Sequence
  Description of Artificial Sequence: Synthetic peptide
  MOD_RES (5)..(5): hexose-GlcNAcylated threonine
  MOD_RES (6)..(6): hexose-GlcNAcylated serine
APPSTSAAALFFRKNLLRLTG

SEQ ID NO: 8650 - protein, 20 aa, Artificial Sequence
  Description of Artificial Sequence: Synthetic peptide
  MOD_RES (5)..(5): hexose-GlcNAcylated asparagine
APRGNVTSLFFRKNLLRLTG

SEQ ID NO: 8651 - protein, 20 aa, Artificial Sequence
  Description of Artificial Sequence: Synthetic peptide
  MOD_RES (4)..(4): O-GlcNAcylated threonine
APRTNGVAMFFRKNLLRLTG

SEQ ID NO: 8652 - protein, 19 aa, Artificial Sequence
  Description of Artificial Sequence: Synthetic peptide
  MOD_RES (4)..(4): O-GlcNAcylated serine
APTSAAALFFRKNLLRLTG

SEQ ID NO: 8653 - protein, 20 aa, Artificial Sequence
  Description of Artificial Sequence: Synthetic peptide
  MOD_RES (4)..(4): O-GlcNAcylated serine
APTSASNVMFFRKNLLRLTG

SEQ ID NO: 8654 - protein, 20 aa, Artificial Sequence
  Description of Artificial Sequence: Synthetic peptide
  MOD_RES (6)..(6): O-GlcNAcylated serine
APTSASNVMFFRKNLLRLTG

SEQ ID NO: 8655 - protein, 20 aa, Artificial Sequence
  Description of Artificial Sequence: Synthetic peptide
  MOD_RES (4)..(4): O-GlcNAcylated serine
APVSASASVFFRKNLLRLTG

SEQ ID NO: 8656 - protein, 20 aa, Artificial Sequence
  Description of Artificial Sequence: Synthetic peptide
  MOD_RES (4)..(4): O-GlcNAcylated serine
APVSSKSSLFFRKNLLRLTG

SEQ ID NO: 8657 - protein, 20 aa, Artificial Sequence
  Description of Artificial Sequence: Synthetic peptide
  MISC_FEATURE (3)..(5): at least one of the serine or threonine residues is modified with O-GlcNAc
EPSSTVVSLFFRKNLLRLTG

SEQ ID NO: 8658 - protein, 20 aa, Artificial Sequence
  Description of Artificial Sequence: Synthetic peptide
  MOD_RES (3)..(3): O-GlcNAcylated serine
EPSSTVVSLFFRKNLLRLTG

SEQ ID NO: 8659 - protein, 20 aa, Artificial Sequence
  Description of Artificial Sequence: Synthetic peptide
  MOD_RES (4)..(4): O-GlcNAcylated serine
EPSSTVVSLFFRKNLLRLTG

SEQ ID NO: 8660 - protein, 20 aa, Artificial Sequence
  Description of Artificial Sequence: Synthetic peptide
  MOD_RES (5)..(5): O-GlcNAcylated threonine
EPSSTVVSLFFRKNLLRLTG

SEQ ID NO: 8661 - protein, 21 aa, Artificial Sequence
  Description of Artificial Sequence: Synthetic peptide
  MOD_RES (4)..(4): O-GlcNAcylated serine
GLSSLAEEAAFFRKNLLRLTG

SEQ ID NO: 8662 - protein, 20 aa, Artificial Sequence
  Description of Artificial Sequence: Synthetic peptide
  MISC_FEATURE (1)..(20): two GlcNAc moeities were detected, but could not be assigned to specific amino acids
  MISC_FEATURE (3)..(5): at least one of the serine or threonine residues is modified with O-GlcNAc
HPSSSAAVLFFRKNLLRLTG

SEQ ID NO: 8663 - protein, 21 aa, Artificial Sequence
  Description of Artificial Sequence: Synthetic peptide
  MISC_FEATURE (3)..(5): at least one of the serine or threonine residues is modified with O-GlcNAc
HPSSTASTALFFRKNLLRLTG

SEQ ID NO: 8664 - protein, 20 aa, Artificial Sequence
  Description of Artificial Sequence: Synthetic peptide
  MOD_RES (4)..(4): O-GlcNAcylated serine
HPMSTASQVFFRKNLLRLTG

SEQ ID NO: 8665 - protein, 20 aa, Artificial Sequence
  Description of Artificial Sequence: Synthetic peptide
  MOD_RES (3)..(3): O-GlcNAcylated serine
  MOD_RES (4)..(4): O-GlcNAcylated serine
HPSSTAAVLFFRKNLLRLTG

SEQ ID NO: 8666 - protein, 20 aa, Artificial Sequence
  Description of Artificial Sequence: Synthetic peptide
  MOD_RES (3)..(3): O-GlcNAcylated serine
  MOD_RES (5)..(5): O-GlcNAcylated threonine
HPSSTAAVLFFRKNLLRLTG

SEQ ID NO: 8667 - protein, 20 aa, Artificial Sequence
  Description of Artificial Sequence: Synthetic peptide
  MOD_RES (4)..(4): O-GlcNAcylated serine
  MOD_RES (5)..(5): O-GlcNAcylated threonine
HPSSTAAVLFFRKNLLRLTG

SEQ ID NO: 8668 - protein, 21 aa, Artificial Sequence
  Description of Artificial Sequence: Synthetic peptide
  MOD_RES (3)..(3): O-GlcNAcylated serine
HPSSTASTALFFRKNLLRLTG

SEQ ID NO: 8669 - protein, 21 aa, Artificial Sequence
  Description of Artificial Sequence: Synthetic peptide
  MOD_RES (4)..(4): O-GlcNAcylated serine
HPSSTASTALFFRKNLLRLTG

SEQ ID NO: 8670 - protein, 21 aa, Artificial Sequence
  Description of Artificial Sequence: Synthetic peptide
  MOD_RES (5)..(5): O-GlcNAcylated threonine
HPSSTASTALFFRKNLLRLTG

SEQ ID NO: 8671 - protein, 19 aa, Artificial Sequence
  Description of Artificial Sequence: Synthetic peptide
  MOD_RES (4)..(4): O-GlcNAcylated threonine
HPTTVASYFFRKNLLRLTG

SEQ ID NO: 8672 - protein, 20 aa, Artificial Sequence
  Description of Artificial Sequence: Synthetic peptide
  MOD_RES (4)..(4): O-GlcNAcylated serine
IPISLHTSLFFRKNLLRLTG

SEQ ID NO: 8673 - protein, 20 aa, Artificial Sequence
  Description of Artificial Sequence: Synthetic peptide
  MOD_RES (4)..(4): O-GlcNAcylated serine
IPTSSVLSLFFRKNLLRLTG

SEQ ID NO: 8674 - protein, 20 aa, Artificial Sequence
  Description of Artificial Sequence: Synthetic peptide
  MOD_RES (4)..(4): O-GlcNAcylated serine
IPVSKPLSLFFRKNLLRLTG

SEQ ID NO: 8675 - protein, 20 aa, Artificial Sequence
  Description of Artificial Sequence: Synthetic peptide
  MOD_RES (4)..(4): hexose-GlcNAcylated serine
IPVSKPLSLFFRKNLLRLTG

SEQ ID NO: 8676 - protein, 20 aa, Artificial Sequence
  Description of Artificial Sequence: Synthetic peptide
  MOD_RES (4)..(4): O-GlcNAcylated serine
IPVSSHNSLFFRKNLLRLTG

SEQ ID NO: 8677 - protein, 20 aa, Artificial Sequence
  Description of Artificial Sequence: Synthetic peptide
  MOD_RES (4)..(4): O-GlcNAcylated serine
  MOD_RES (5)..(5): O-GlcNAcylated serine
IPVSSHNSLFFRKNLLRLTG

SEQ ID NO: 8678 - protein, 20 aa, Artificial Sequence
  Description of Artificial Sequence: Synthetic peptide
  MOD_RES (4)..(4): hexose-GlcNAcylated serine
IPVSSHNSLFFRKNLLRLTG

SEQ ID NO: 8679 - protein, 20 aa, Artificial Sequence
  Description of Artificial Sequence: Synthetic peptide
  MOD_RES (4)..(4): acetyl-GlcNAcylated serine
IPVSSHNSLFFRKNLLRLTG

SEQ ID NO: 8680 - protein, 21 aa, Artificial Sequence
  Description of Artificial Sequence: Synthetic peptide
  MOD_RES (4)..(4): O-GlcNAcylated threonine
KPPTSQSSVLFFRKNLLRLTG

SEQ ID NO: 8681 - protein, 21 aa, Artificial Sequence
  Description of Artificial Sequence: Synthetic peptide
  MOD_RES (4)..(4): hexose-GlcNAcylated threonine
KPPTSQSSVLFFRKNLLRLTG

SEQ ID NO: 8682 - protein, 21 aa, Artificial Sequence
  Description of Artificial Sequence: Synthetic peptide
  MOD_RES (5)..(5): O-GlcNAcylated serine
KPPTSQSSVLFFRKNLLRLTG

SEQ ID NO: 8683 - protein, 21 aa, Artificial Sequence
  Description of Artificial Sequence: Synthetic peptide
  MOD_RES (5)..(5): hexose-GlcNAcylated serine
KPPTSQSSVLFFRKNLLRLTG

SEQ ID NO: 8684 - protein, 20 aa, Artificial Sequence
  Description of Artificial Sequence: Synthetic peptide
  MOD_RES (5)..(5): hexose-GlcNAcylated serine
KPPVSFFSLFFRKNLLRLTG

SEQ ID NO: 8685 - protein, 20 aa, Artificial Sequence
  Description of Artificial Sequence: Synthetic peptide
  MOD_RES (6)..(6): hexose-GlcNAcylated asparagine
KPTLYNVSLFFRKNLLRLTG

SEQ ID NO: 8686 - protein, 19 aa, Artificial Sequence
  Description of Artificial Sequence: Synthetic peptide
  MISC_FEATURE (5)..(6): at least one of the serine or threonine residues is modified with O-GlcNAc
LPRNSTMMFFRKNLLRLTG

SEQ ID NO: 8687 - protein, 19 aa, Artificial Sequence
  Description of Artificial Sequence: Synthetic peptide
  MOD_RES (5)..(5): O-GlcNAcylated serine
  MOD_RES (6)..(6): O-GlcNAcylated threonine
LPRNSTMMFFRKNLLRLTG

SEQ ID NO: 8688 - protein, 20 aa, Artificial Sequence
  Description of Artificial Sequence: Synthetic peptide
  MOD_RES (4)..(4): O-GlcNAcylated serine
LPTSLPSSLFFRKNLLRLTG

SEQ ID NO: 8689 - protein, 21 aa, Artificial Sequence
  Description of Artificial Sequence: Synthetic peptide
  MOD_RES (7)..(7): hexose-GlcNAcylated threonine
MPVRPTTNTFFFRKNLLRLTG

SEQ ID NO: 8690 - protein, 21 aa, Artificial Sequence
  Description of Artificial Sequence: Synthetic peptide
  MOD_RES (4)..(4): di-methylated arginine
  MOD_RES (7)..(7): hexose-GlcNAcylated threonine
MPVRPTTNTFFFRKNLLRLTG

SEQ ID NO: 8691 - protein, 20 aa, Artificial Sequence
  Description of Artificial Sequence: Synthetic peptide
  MOD_RES (4)..(4): O-GlcNAcylated threonine
MPVTSSSFFFFRKNLLRLTG

SEQ ID NO: 8692 - protein, 19 aa, Artificial Sequence
  Description of Artificial Sequence: Synthetic peptide
  MOD_RES (4)..(4): O-GlcNAcylated serine
NPVSLPSLFFRKNLLRLTG

SEQ ID NO: 8693 - protein, 20 aa, Artificial Sequence
  Description of Artificial Sequence: Synthetic peptide
  MOD_RES (4)..(4): hexose-GlcNAcylated threonine
PPSTSAAALFFRKNLLRLTG

SEQ ID NO: 8694 - protein, 20 aa, Artificial Sequence
  Description of Artificial Sequence: Synthetic peptide
  MOD_RES (5)..(5): hexose-GlcNAcylated serine
PPSTSAAALFFRKNLLRLTG

SEQ ID NO: 8695 - protein, 20 aa, Artificial Sequence
  Description of Artificial Sequence: Synthetic peptide
  MISC_FEATURE (4)..(6): at least one of the serine or threonine residues is modified with O-GlcNAc
RPPSSSQQLFFRKNLLRLTG

SEQ ID NO: 8696 - protein, 20 aa, Artificial Sequence
  Description of Artificial Sequence: Synthetic peptide
  MOD_RES (5)..(5): O-GlcNAcylated threonine
RPPITQSSLFFRKNLLRLTG

SEQ ID NO: 8697 - protein, 20 aa, Artificial Sequence
  Description of Artificial Sequence: Synthetic peptide
  MOD_RES (1)..(1): methylated arginine
  MOD_RES (5)..(5): O-GlcNAcylated threonine
RPPITQSSLFFRKNLLRLTG

SEQ ID NO: 8698 - protein, 20 aa, Artificial Sequence
  Description of Artificial Sequence: Synthetic peptide
  MOD_RES (1)..(1): di-methylated arginine
  MOD_RES (5)..(5): O-GlcNAcylated threonine
RPPITQSSLFFRKNLLRLTG

SEQ ID NO: 8699 - protein, 20 aa, Artificial Sequence
  Description of Artificial Sequence: Synthetic peptide
  MOD_RES (1)..(1): di-methylated arginine
  MOD_RES (5)..(5): acetyl-GlcNAcylated threonine
RPPITQSSLFFRKNLLRLTG

SEQ ID NO: 8700 - protein, 21 aa, Artificial Sequence
  Description of Artificial Sequence: Synthetic peptide
  MOD_RES (5)..(5): hexose-GlcNAcylated serine
RPPQSSSVSLFFRKNLLRLTG

SEQ ID NO: 8701 - protein, 20 aa, Artificial Sequence
  Description of Artificial Sequence: Synthetic peptide
  MOD_RES (4)..(4): O-GlcNAcylated serine
RPPSSSQQLFFRKNLLRLTG

SEQ ID NO: 8702 - protein, 20 aa, Artificial Sequence
  Description of Artificial Sequence: Synthetic peptide
  MOD_RES (5)..(5): O-GlcNAcylated serine
RPPSSSQQLFFRKNLLRLTG

SEQ ID NO: 8703 - protein, 20 aa, Artificial Sequence
  Description of Artificial Sequence: Synthetic peptide
  MOD_RES (6)..(6): O-GlcNAcylated serine
RPPSSSQQLFFRKNLLRLTG

SEQ ID NO: 8704 - protein, 21 aa, Artificial Sequence
  Description of Artificial Sequence: Synthetic peptide
  MOD_RES (5)..(5): O-GlcNAcylated threonine
RPPVTKASSFFFRKNLLRLTG

SEQ ID NO: 8705 - protein, 21 aa, Artificial Sequence
  Description of Artificial Sequence: Synthetic peptide
  MOD_RES (4)..(4): O-GlcNAcylated threonine
RPVTASITTMFFRKNLLRLTG

SEQ ID NO: 8706 - protein, 21 aa, Artificial Sequence
  Description of Artificial Sequence: Synthetic peptide
  MOD_RES (5)..(5): O-GlcNAcylated serine
TPASSRAQTLFFRKNLLRLTG

SEQ ID NO: 8707 - protein, 20 aa, Artificial Sequence
  Description of Artificial Sequence: Synthetic peptide
  MOD_RES (4)..(4): O-GlcNAcylated serine
TPASSSSALFFRKNLLRLTG

SEQ ID NO: 8708 - protein, 20 aa, Artificial Sequence
  Description of Artificial Sequence: Synthetic peptide
  MOD_RES (4)..(4): O-GlcNAcylated serine
TPISQAQKLFFRKNLLRLTG

SEQ ID NO: 8709 - protein, 20 aa, Artificial Sequence
  Description of Artificial Sequence: Synthetic peptide
  MOD_RES (4)..(4): O-GlcNAcylated serine
TPVSSANMMFFRKNLLRLTG

SEQ ID NO: 8710 - protein, 20 aa, Artificial Sequence
  Description of Artificial Sequence: Synthetic peptide
  MOD_RES (4)..(4): O-GlcNAcylated serine
VLTSNVQTIFFRKNLLRLTG

SEQ ID NO: 8711 - protein, 20 aa, Artificial Sequence
  Description of Artificial Sequence: Synthetic peptide
  MOD_RES (4)..(4): O-GlcNAcylated serine
VPASSTSTLFFRKNLLRLTG

SEQ ID NO: 8712 - protein, 21 aa, Artificial Sequence
  Description of Artificial Sequence: Synthetic peptide
  MOD_RES (4)..(4): O-GlcNAcylated threonine
VPATHGQVTYFFRKNLLRLTG

SEQ ID NO: 8713 - protein, 19 aa, Artificial Sequence
  Description of Artificial Sequence: Synthetic peptide
  MOD_RES (3)..(3): O-GlcNAcylated threonine
VPTTSSSLFFRKNLLRLTG

SEQ ID NO: 8714 - protein, 19 aa, Artificial Sequence
  Description of Artificial Sequence: Synthetic peptide
  MOD_RES (4)..(4): O-GlcNAcylated threonine
VPTTSSSLFFRKNLLRLTG

SEQ ID NO: 8715 - protein, 19 aa, Artificial Sequence
  Description of Artificial Sequence: Synthetic peptide
  MOD_RES (5)..(5): O-GlcNAcylated serine
VPTTSSSLFFRKNLLRLTG

SEQ ID NO: 8716 - protein, 20 aa, Artificial Sequence
  Description of Artificial Sequence: Synthetic peptide
  MOD_RES (4)..(4): O-GlcNAcylated serine
VPVSGTQGLFFRKNLLRLTG

SEQ ID NO: 8717 - protein, 20 aa, Artificial Sequence
  Description of Artificial Sequence: Synthetic peptide
  MOD_RES (4)..(4): O-GlcNAcylated serine
VPVSNQSSLFFRKNLLRLTG

SEQ ID NO: 8718 - protein, 20 aa, Artificial Sequence
  Description of Artificial Sequence: Synthetic peptide
  MOD_RES (4)..(4): O-GlcNAcylated serine
VPVSSASELFFRKNLLRLTG

SEQ ID NO: 8719 - protein, 20 aa, Artificial Sequence
  Description of Artificial Sequence: Synthetic peptide
  MOD_RES (4)..(4): O-GlcNAcylated serine
VPVSVGPSLFFRKNLLRLTG

SEQ ID NO: 8720 - protein, 20 aa, Artificial Sequence
  Description of Artificial Sequence: Synthetic peptide
  MOD_RES (4)..(4): O-GlcNAcylated threonine
  MOD_RES (5)..(5): O-GlcNAcylated serine
ALTTSAHSVFFRKNWLRLTW

SEQ ID NO: 8721 - protein, 20 aa, Artificial Sequence
  Description of Artificial Sequence: Synthetic peptide
  MOD_RES (4)..(4): O-GlcNAcylated threonine
ALTTSAHSVFFRKNWLRLTW

SEQ ID NO: 8722 - protein, 20 aa, Artificial Sequence
  Description of Artificial Sequence: Synthetic peptide
  MOD_RES (5)..(5): O-GlcNAcylated serine
ALTTSAHSVFFRKNWLRLTW

SEQ ID NO: 8723 - protein, 21 aa, Artificial Sequence
  Description of Artificial Sequence: Synthetic peptide
  MISC_FEATURE (4)..(6): at least one of the serine or threonine residues is modified with O-GlcNAc
APPSTSAAALFFRKNWLRLTW

SEQ ID NO: 8724 - protein, 21 aa, Artificial Sequence
  Description of Artificial Sequence: Synthetic peptide
  MOD_RES (4)..(4): O-GlcNAcylated serine
APPSTSAAALFFRKNWLRLTW

SEQ ID NO: 8725 - protein, 21 aa, Artificial Sequence
  Description of Artificial Sequence: Synthetic peptide
  MOD_RES (4)..(4): O-GlcNAcylated serine
  MOD_RES (6)..(6): O-GlcNAcylated serine
APPSTSAAALFFRKNWLRLTW

SEQ ID NO: 8726 - protein, 21 aa, Artificial Sequence
  Description of Artificial Sequence: Synthetic peptide
  MOD_RES (5)..(5): O-GlcNAcylated threonine
APPSTSAAALFFRKNWLRLTW

SEQ ID NO: 8727 - protein, 21 aa, Artificial Sequence
  Description of Artificial Sequence: Synthetic peptide
  MOD_RES (6)..(6): O-GlcNAcylated serine
APPSTSAAALFFRKNWLRLTW

SEQ ID NO: 8728 - protein, 21 aa, Artificial Sequence
  Description of Artificial Sequence: Synthetic peptide
  MOD_RES (4)..(4): O-GlcNAcylated serine
  MOD_RES (5)..(5): O-GlcNAcylated threonine
APPSTSAAALFFRKNWLRLTW

SEQ ID NO: 8729 - protein, 21 aa, Artificial Sequence
  Description of Artificial Sequence: Synthetic peptide
  MOD_RES (5)..(5): O-GlcNAcylated threonine
  MOD_RES (6)..(6): O-GlcNAcylated serine
APPSTSAAALFFRKNWLRLTW

SEQ ID NO: 8730 - protein, 21 aa, Artificial Sequence
  Description of Artificial Sequence: Synthetic peptide
  MOD_RES (4)..(4): hexose-GlcNAcylated serine
APPSTSAAALFFRKNWLRLTW

SEQ ID NO: 8731 - protein, 21 aa, Artificial Sequence
  Description of Artificial Sequence: Synthetic peptide
  MOD_RES (5)..(5): hexose-GlcNAcylated threonine
APPSTSAAALFFRKNWLRLTW

SEQ ID NO: 8732 - protein, 21 aa, Artificial Sequence
  Description of Artificial Sequence: Synthetic peptide
  MOD_RES (6)..(6): hexose-GlcNAcylated serine
APPSTSAAALFFRKNWLRLTW

SEQ ID NO: 8733 - protein, 21 aa, Artificial Sequence
  Description of Artificial Sequence: Synthetic peptide
  MOD_RES (5)..(5): hexose-GlcNAcylated threonine
  MOD_RES (6)..(6): O-GlcNAcylated serine
APPSTSAAALFFRKNWLRLTW

SEQ ID NO: 8734 - protein, 21 aa, Artificial Sequence
  Description of Artificial Sequence: Synthetic peptide
  MOD_RES (4)..(4): hexose-GlcNAcylated serine
  MOD_RES (5)..(5): hexose-GlcNAcylated threonine
APPSTSAAALFFRKNWLRLTW

SEQ ID NO: 8735 - protein, 21 aa, Artificial Sequence
  Description of Artificial Sequence: Synthetic peptide
  MOD_RES (4)..(4): hexose-GlcNAcylated serine
  MOD_RES (6)..(6): hexose-GlcNAcylated serine
APPSTSAAALFFRKNWLRLTW

SEQ ID NO: 8736 - protein, 21 aa, Artificial Sequence
  Description of Artificial Sequence: Synthetic peptide
  MOD_RES (5)..(5): hexose-GlcNAcylated threonine
  MOD_RES (6)..(6): hexose-GlcNAcylated serine
APPSTSAAALFFRKNWLRLTW

SEQ ID NO: 8737 - protein, 20 aa, Artificial Sequence
  Description of Artificial Sequence: Synthetic peptide
  MOD_RES (5)..(5): hexose-GlcNAcylated asparagine
APRGNVTSLFFRKNWLRLTW

SEQ ID NO: 8738 - protein, 20 aa, Artificial Sequence
  Description of Artificial Sequence: Synthetic peptide
  MOD_RES (4)..(4): O-GlcNAcylated threonine
APRTNGVAMFFRKNWLRLTW

SEQ ID NO: 8739 - protein, 19 aa, Artificial Sequence
  Description of Artificial Sequence: Synthetic peptide
  MOD_RES (4)..(4): O-GlcNAcylated serine
APTSAAALFFRKNWLRLTW

SEQ ID NO: 8740 - protein, 20 aa, Artificial Sequence
  Description of Artificial Sequence: Synthetic peptide
  MOD_RES (4)..(4): O-GlcNAcylated serine
APTSASNVMFFRKNWLRLTW

SEQ ID NO: 8741 - protein, 20 aa, Artificial Sequence
  Description of Artificial Sequence: Synthetic peptide
  MOD_RES (6)..(6): O-GlcNAcylated serine
APTSASNVMFFRKNWLRLTW

SEQ ID NO: 8742 - protein, 20 aa, Artificial Sequence
  Description of Artificial Sequence: Synthetic peptide
  MOD_RES (4)..(4): O-GlcNAcylated serine
APVSASASVFFRKNWLRLTW

SEQ ID NO: 8743 - protein, 20 aa, Artificial Sequence
  Description of Artificial Sequence: Synthetic peptide
  MOD_RES (4)..(4): O-GlcNAcylated serine
APVSSKSSLFFRKNWLRLTW

SEQ ID NO: 8744 - protein, 20 aa, Artificial Sequence
  Description of Artificial Sequence: Synthetic peptide
  MISC_FEATURE (3)..(5): at least one of the serine or threonine residues is modified with O-GlcNAc
EPSSTVVSLFFRKNWLRLTW

SEQ ID NO: 8745 - protein, 20 aa, Artificial Sequence
  Description of Artificial Sequence: Synthetic peptide
  MOD_RES (3)..(3): O-GlcNAcylated serine
EPSSTVVSLFFRKNWLRLTW

SEQ ID NO: 8746 - protein, 20 aa, Artificial Sequence
  Description of Artificial Sequence: Synthetic peptide
  MOD_RES (4)..(4): O-GlcNAcylated serine
EPSSTVVSLFFRKNWLRLTW

SEQ ID NO: 8747 - protein, 20 aa, Artificial Sequence
  Description of Artificial Sequence: Synthetic peptide
  MOD_RES (5)..(5): O-GlcNAcylated threonine
EPSSTVVSLFFRKNWLRLTW

SEQ ID NO: 8748 - protein, 21 aa, Artificial Sequence
  Description of Artificial Sequence: Synthetic peptide
  MOD_RES (4)..(4): O-GlcNAcylated serine
GLSSLAEEAAFFRKNWLRLTW

SEQ ID NO: 8749 - protein, 20 aa, Artificial Sequence
  Description of Artificial Sequence: Synthetic peptide
  MISC_FEATURE (1)..(20): two GlcNAc moeities were detected, but could not be assigned to specific amino acids
  MISC_FEATURE (3)..(5): at least one of the serine or threonine residues is modified with O-GlcNAc
HPSSSAAVLFFRKNWLRLTW

SEQ ID NO: 8750 - protein, 21 aa, Artificial Sequence
  Description of Artificial Sequence: Synthetic peptide
  MISC_FEATURE (3)..(5): at least one of the serine or threonine residues is modified with O-GlcNAc
HPSSTASTALFFRKNWLRLTW

SEQ ID NO: 8751 - protein, 20 aa, Artificial Sequence
  Description of Artificial Sequence: Synthetic peptide
  MOD_RES (4)..(4): O-GlcNAcylated serine
HPMSTASQVFFRKNWLRLTW

SEQ ID NO: 8752 - protein, 20 aa, Artificial Sequence
  Description of Artificial Sequence: Synthetic peptide
  MOD_RES (3)..(3): O-GlcNAcylated serine
  MOD_RES (4)..(4): O-GlcNAcylated serine
HPSSTAAVLFFRKNWLRLTW

SEQ ID NO: 8753 - protein, 20 aa, Artificial Sequence
  Description of Artificial Sequence: Synthetic peptide
  MOD_RES (3)..(3): O-GlcNAcylated serine
  MOD_RES (5)..(5): O-GlcNAcylated threonine
HPSSTAAVLFFRKNWLRLTW

SEQ ID NO: 8754 - protein, 20 aa, Artificial Sequence
  Description of Artificial Sequence: Synthetic peptide
  MOD_RES (4)..(4): O-GlcNAcylated serine
  MOD_RES (5)..(5): O-GlcNAcylated threonine
HPSSTAAVLFFRKNWLRLTW

SEQ ID NO: 8755 - protein, 21 aa, Artificial Sequence
  Description of Artificial Sequence: Synthetic peptide
  MOD_RES (3)..(3): O-GlcNAcylated serine
HPSSTASTALFFRKNWLRLTW

SEQ ID NO: 8756 - protein, 21 aa, Artificial Sequence
  Description of Artificial Sequence: Synthetic peptide
  MOD_RES (4)..(4): O-GlcNAcylated serine
HPSSTASTALFFRKNWLRLTW

SEQ ID NO: 8757 - protein, 21 aa, Artificial Sequence
  Description of Artificial Sequence: Synthetic peptide
  MOD_RES (5)..(5): O-GlcNAcylated threonine
HPSSTASTALFFRKNWLRLTW

SEQ ID NO: 8758 - protein, 19 aa, Artificial Sequence
  Description of Artificial Sequence: Synthetic peptide
  MOD_RES (4)..(4): O-GlcNAcylated threonine
HPTTVASYFFRKNWLRLTW

SEQ ID NO: 8759 - protein, 20 aa, Artificial Sequence
  Description of Artificial Sequence: Synthetic peptide
  MOD_RES (4)..(4): O-GlcNAcylated serine
IPISLHTSLFFRKNWLRLTW

SEQ ID NO: 8760 - protein, 20 aa, Artificial Sequence
  Description of Artificial Sequence: Synthetic peptide
  MOD_RES (4)..(4): O-GlcNAcylated serine
IPTSSVLSLFFRKNWLRLTW

SEQ ID NO: 8761 - protein, 20 aa, Artificial Sequence
  Description of Artificial Sequence: Synthetic peptide
  MOD_RES (4)..(4): O-GlcNAcylated serine
IPVSKPLSLFFRKNWLRLTW

SEQ ID NO: 8762 - protein, 20 aa, Artificial Sequence
  Description of Artificial Sequence: Synthetic peptide
  MOD_RES (4)..(4): hexose-GlcNAcylated serine
IPVSKPLSLFFRKNWLRLTW

SEQ ID NO: 8763 - protein, 20 aa, Artificial Sequence
  Description of Artificial Sequence: Synthetic peptide
  MOD_RES (4)..(4): O-GlcNAcylated serine
IPVSSHNSLFFRKNWLRLTW

SEQ ID NO: 8764 - protein, 20 aa, Artificial Sequence
  Description of Artificial Sequence: Synthetic peptide
  MOD_RES (4)..(4): O-GlcNAcylated serine
  MOD_RES (5)..(5): O-GlcNAcylated serine
IPVSSHNSLFFRKNWLRLTW

SEQ ID NO: 8765 - protein, 20 aa, Artificial Sequence
  Description of Artificial Sequence: Synthetic peptide
  MOD_RES (4)..(4): hexose-GlcNAcylated serine
IPVSSHNSLFFRKNWLRLTW

SEQ ID NO: 8766 - protein, 20 aa, Artificial Sequence
  Description of Artificial Sequence: Synthetic peptide
  MOD_RES (4)..(4): acetyl-GlcNAcylated serine
IPVSSHNSLFFRKNWLRLTW

SEQ ID NO: 8767 - protein, 21 aa, Artificial Sequence
  Description of Artificial Sequence: Synthetic peptide
  MOD_RES (4)..(4): O-GlcNAcylated threonine
KPPTSQSSVLFFRKNWLRLTW

SEQ ID NO: 8768 - protein, 21 aa, Artificial Sequence
  Description of Artificial Sequence: Synthetic peptide
  MOD_RES (4)..(4): hexose-GlcNAcylated threonine
KPPTSQSSVLFFRKNWLRLTW

SEQ ID NO: 8769 - protein, 21 aa, Artificial Sequence
  Description of Artificial Sequence: Synthetic peptide
  MOD_RES (5)..(5): O-GlcNAcylated serine
KPPTSQSSVLFFRKNWLRLTW

SEQ ID NO: 8770 - protein, 21 aa, Artificial Sequence
  Description of Artificial Sequence: Synthetic peptide
  MOD_RES (5)..(5): hexose-GlcNAcylated serine
KPPTSQSSVLFFRKNWLRLTW

SEQ ID NO: 8771 - protein, 20 aa, Artificial Sequence
  Description of Artificial Sequence: Synthetic peptide
  MOD_RES (5)..(5): hexose-GlcNAcylated serine
KPPVSFFSLFFRKNWLRLTW

SEQ ID NO: 8772 - protein, 20 aa, Artificial Sequence
  Description of Artificial Sequence: Synthetic peptide
  MOD_RES (6)..(6): hexose-GlcNAcylated asparagine
KPTLYNVSLFFRKNWLRLTW

SEQ ID NO: 8773 - protein, 19 aa, Artificial Sequence
  Description of Artificial Sequence: Synthetic peptide
  MISC_FEATURE (5)..(6): at least one of the serine or threonine residues is modified with O-GlcNAc
LPRNSTMMFFRKNWLRLTW

SEQ ID NO: 8774 - protein, 19 aa, Artificial Sequence
  Description of Artificial Sequence: Synthetic peptide
  MOD_RES (5)..(5): O-GlcNAcylated serine
  MOD_RES (6)..(6): O-GlcNAcylated threonine
LPRNSTMMFFRKNWLRLTW

SEQ ID NO: 8775 - protein, 20 aa, Artificial Sequence
  Description of Artificial Sequence: Synthetic peptide
  MOD_RES (4)..(4): O-GlcNAcylated serine
LPTSLPSSLFFRKNWLRLTW

SEQ ID NO: 8776 - protein, 21 aa, Artificial Sequence
  Description of Artificial Sequence: Synthetic peptide
  MOD_RES (7)..(7): hexose-GlcNAcylated threonine
MPVRPTTNTFFFRKNWLRLTW

SEQ ID NO: 8777 - protein, 21 aa, Artificial Sequence
  Description of Artificial Sequence: Synthetic peptide
  MOD_RES (4)..(4): di-methylated arginine
  MOD_RES (7)..(7): hexose-GlcNAcylated threonine
MPVRPTTNTFFFRKNWLRLTW

SEQ ID NO: 8778 - protein, 20 aa, Artificial Sequence
  Description of Artificial Sequence: Synthetic peptide
  MOD_RES (4)..(4): O-GlcNAcylated threonine
MPVTSSSFFFFRKNWLRLTW

SEQ ID NO: 8779 - protein, 19 aa, Artificial Sequence
  Description of Artificial Sequence: Synthetic peptide
  MOD_RES (4)..(4): O-GlcNAcylated serine
NPVSLPSLFFRKNWLRLTW

SEQ ID NO: 8780 - protein, 20 aa, Artificial Sequence
  Description of Artificial Sequence: Synthetic peptide
  MOD_RES (4)..(4): hexose-GlcNAcylated threonine
PPSTSAAALFFRKNWLRLTW

SEQ ID NO: 8781 - protein, 20 aa, Artificial Sequence
  Description of Artificial Sequence: Synthetic peptide
  MOD_RES (5)..(5): hexose-GlcNAcylated serine
PPSTSAAALFFRKNWLRLTW

SEQ ID NO: 8782 - protein, 20 aa, Artificial Sequence
  Description of Artificial Sequence: Synthetic peptide
  MISC_FEATURE (4)..(6): at least one of the serine or threonine residues is modified with O-GlcNAc
RPPSSSQQLFFRKNWLRLTW

SEQ ID NO: 8783 - protein, 20 aa, Artificial Sequence
  Description of Artificial Sequence: Synthetic peptide
  MOD_RES (5)..(5): O-GlcNAcylated threonine
RPPITQSSLFFRKNWLRLTW

SEQ ID NO: 8784 - protein, 20 aa, Artificial Sequence
  Description of Artificial Sequence: Synthetic peptide
  MOD_RES (1)..(1): methylated arginine
  MOD_RES (5)..(5): O-GlcNAcylated threonine
RPPITQSSLFFRKNWLRLTW

SEQ ID NO: 8785 - protein, 20 aa, Artificial Sequence
  Description of Artificial Sequence: Synthetic peptide
  MOD_RES (1)..(1): di-methylated arginine
  MOD_RES (5)..(5): O-GlcNAcylated threonine
RPPITQSSLFFRKNWLRLTW

SEQ ID NO: 8786 - protein, 20 aa, Artificial Sequence
  Description of Artificial Sequence: Synthetic peptide
  MOD_RES (1)..(1): di-methylated arginine
  MOD_RES (5)..(5): acetyl-GlcNAcylated threonine
RPPITQSSLFFRKNWLRLTW

SEQ ID NO: 8787 - protein, 21 aa, Artificial Sequence
  Description of Artificial Sequence: Synthetic peptide
  MOD_RES (5)..(5): hexose-GlcNAcylated serine
RPPQSSSVSLFFRKNWLRLTW

SEQ ID NO: 8788 - protein, 20 aa, Artificial Sequence
  Description of Artificial Sequence: Synthetic peptide
  MOD_RES (4)..(4): O-GlcNAcylated serine
RPPSSSQQLFFRKNWLRLTW

SEQ ID NO: 8789 - protein, 20 aa, Artificial Sequence
  Description of Artificial Sequence: Synthetic peptide
  MOD_RES (5)..(5): O-GlcNAcylated serine
RPPSSSQQLFFRKNWLRLTW

SEQ ID NO: 8790 - protein, 20 aa, Artificial Sequence
  Description of Artificial Sequence: Synthetic peptide
  MOD_RES (6)..(6): O-GlcNAcylated serine
RPPSSSQQLFFRKNWLRLTW

SEQ ID NO: 8791 - protein, 21 aa, Artificial Sequence
  Description of Artificial Sequence: Synthetic peptide
  MOD_RES (5)..(5): O-GlcNAcylated threonine
RPPVTKASSFFFRKNWLRLTW

SEQ ID NO: 8792 - protein, 21 aa, Artificial Sequence
  Description of Artificial Sequence: Synthetic peptide
  MOD_RES (4)..(4): O-GlcNAcylated threonine
RPVTASITTMFFRKNWLRLTW

SEQ ID NO: 8793 - protein, 21 aa, Artificial Sequence
  Description of Artificial Sequence: Synthetic peptide
  MOD_RES (5)..(5): O-GlcNAcylated serine
TPASSRAQTLFFRKNWLRLTW

SEQ ID NO: 8794 - protein, 20 aa, Artificial Sequence
  Description of Artificial Sequence: Synthetic peptide
  MOD_RES (4)..(4): O-GlcNAcylated serine
TPASSSSALFFRKNWLRLTW

SEQ ID NO: 8795 - protein, 20 aa, Artificial Sequence
  Description of Artificial Sequence: Synthetic peptide
  MOD_RES (4)..(4): O-GlcNAcylated serine
TPISQAQKLFFRKNWLRLTW

SEQ ID NO: 8796 - protein, 20 aa, Artificial Sequence
  Description of Artificial Sequence: Synthetic peptide
  MOD_RES (4)..(4): O-GlcNAcylated serine
TPVSSANMMFFRKNWLRLTW

SEQ ID NO: 8797 - protein, 20 aa, Artificial Sequence
  Description of Artificial Sequence: Synthetic peptide
  MOD_RES (4)..(4): O-GlcNAcylated serine
VLTSNVQTIFFRKNWLRLTW

SEQ ID NO: 8798 - protein, 20 aa, Artificial Sequence
  Description of Artificial Sequence: Synthetic peptide
  MOD_RES (4)..(4): O-GlcNAcylated serine
VPASSTSTLFFRKNWLRLTW

SEQ ID NO: 8799 - protein, 21 aa, Artificial Sequence
  Description of Artificial Sequence: Synthetic peptide
  MOD_RES (4)..(4): O-GlcNAcylated threonine
VPATHGQVTYFFRKNWLRLTW

SEQ ID NO: 8800 - protein, 19 aa, Artificial Sequence
  Description of Artificial Sequence: Synthetic peptide
  MOD_RES (3)..(3): O-GlcNAcylated threonine
VPTTSSSLFFRKNWLRLTW

SEQ ID NO: 8801 - protein, 19 aa, Artificial Sequence
  Description of Artificial Sequence: Synthetic peptide
  MOD_RES (4)..(4): O-GlcNAcylated threonine
VPTTSSSLFFRKNWLRLTW

SEQ ID NO: 8802 - protein, 19 aa, Artificial Sequence
  Description of Artificial Sequence: Synthetic peptide
  MOD_RES (5)..(5): O-GlcNAcylated serine
VPTTSSSLFFRKNWLRLTW

SEQ ID NO: 8803 - protein, 20 aa, Artificial Sequence
  Description of Artificial Sequence: Synthetic peptide
  MOD_RES (4)..(4): O-GlcNAcylated serine
VPVSGTQGLFFRKNWLRLTW

SEQ ID NO: 8804 - protein, 20 aa, Artificial Sequence
  Description of Artificial Sequence: Synthetic peptide
  MOD_RES (4)..(4): O-GlcNAcylated serine
VPVSNQSSLFFRKNWLRLTW

SEQ ID NO: 8805 - protein, 20 aa, Artificial Sequence
  Description of Artificial Sequence: Synthetic peptide
  MOD_RES (4)..(4): O-GlcNAcylated serine
VPVSSASELFFRKNWLRLTW

SEQ ID NO: 8806 - protein, 20 aa, Artificial Sequence
  Description of Artificial Sequence: Synthetic peptide
  MOD_RES (4)..(4): O-GlcNAcylated serine
VPVSVGPSLFFRKNWLRLTW

SEQ ID NO: 8807 - protein, 645 aa, Artificial Sequence
  Description of Artificial Sequence: Synthetic polypeptide
SKGPAVGIDLGTTYSCVGVFQHGKVEIIANDQGNRTTPSYVAFTDTERLIGDAAKNQVAMNPTNTVFDAKRLIGRRFDDAVVQSDMKHWPFMVVNDAGRPKVQVEYKGETKSFYPEEVSSMVLTKMKEIAEAYLGKTVTNAVVTVPAYFNDSQRQATKDAGTIAGLNVLRIINEPTAAAIAYGLDKKVGAERNVLIFDLGGGTFDVSILTIEDGIFEVKSTAGDTHLGGEDFDNRMVNHFIAEFKRKHKKDISENKRAVRRLRTACERAKRTLSSSTQASIEIDSLYEGIDFYTSITRARFEELNADLFRGTLDPVEKALRDAKLDKSQIHDIVLVGGSTRIPKIQKLLQDFFNGKELNKSINPDEAVAYGAAVQAAILSGDKSENVQDLLLLDVTPLSLGIETAGGVMTVLIKRNTTIPTKQTQTFTTYSDNQPGVLIQVYEGERAMTKDNNLLGKFELTGIPPAPRGVPQIEVTFDIDANGILNVSAVDKSTGKENKITITNDKGRLSKEDIERMVQEAEKYKAEDEKQRDKVSSKNSLESYAFNMKATVEDEKLQGKINDEDKQKILDKCNEIINWLDKNQTAEKEEFEHQQKELEKVCNPIITKLYQSAGGMPGGMPGGFPGGGAPPSGGASSGPTIEEVD

SEQ ID NO: 8808 - protein, 10 aa, Artificial Sequence
  Description of Artificial Sequence: Synthetic peptide
  MOD_RES (4)..(4): phosphorylated serine
RLLSAAENFL

SEQ ID NO: 8809 - protein, 21 aa, Artificial Sequence
  Description of Artificial Sequence: Synthetic peptide
  MOD_RES (4)..(4): phosphorylated serine
RLLSAAENFLFFRKNLLRLTG

SEQ ID NO: 8810 - protein, 21 aa, Artificial Sequence
  Description of Artificial Sequence: Synthetic peptide
  MOD_RES (4)..(4): phosphorylated serine
RLLSAAENFLFFRKNWLRLTW

1. An antigenic polypeptide comprising:
an WIC-binding peptide comprising an amino acid sequence selected from the group consisting of SEQ ID NOs: 98-3000 and 8808; and
an HSP-binding peptide comprising the amino acid sequence of X₁X₂X₃X₄X₅X₆X₇ (SEQ ID NO: 1), wherein X₁ is omitted, N, F, or Q; X₂ is W, L, or F; X₃ is L or I; X₄ is R, L, or K; X₅ is L, W, or I; X₆ is T, L, F, K, R, or W; and X₇ is W, G, K, or F.

2. (canceled)

3. The antigenic polypeptide of claim 1, wherein the HSP-binding peptide comprises the amino acid sequence of:
(a) X₁LX₂LTX₃ (SEQ ID NO: 2), wherein X₁ is W or F; X₂ is R or K; and X₃ is W, F, or G;
(b) NX₁LX₂LTX₃ (SEQ ID NO: 3), wherein X₁ is W or F; X₂ is R or K; and X₃ is W, F, or G;
(c) WLX₁LTX₂ (SEQ ID NO: 4), wherein X₁ is R or K; and X₂ is W or G;
(d) NWLX₁LTX₂ (SEQ ID NO: 5), wherein X₁ is R or K; and X₂ is W or G; or
(e) NWX₁X₂X₃X₄X₅ (SEQ ID NO: 6), wherein X₁ is L or I; X₂ is L, R, or K; X₃ is L or I; X₄ is T, L, F, K, R, or W; and X₅ is W or K;
optionally wherein the amino acid sequence of the HSP-binding peptide comprises an amino acid sequence selected from the group consisting of SEQ ID NOs: 7-42.

4.-40. (canceled)

41. The antigenic polypeptide of claim 1, wherein
the MHC-binding peptide is 8 to 50 amino acids in length, optionally 8, 9, 10, 11, 12, 13, 14, 15, 16, 17, 18, 19, 20, 21, 22, 23, 24, 25, 26, 27, 28, 29, 30, 31, 32, 33, 34, 35, 36, 37, 38, 39, 40, 41, 42, 43, 44, 45, 46, 47, 48, 49, or 50 amino acids in length;
the C-terminus of the MHC-binding peptide is linked to the N-terminus of the HSP-binding peptide, or the N-terminus of the MHC-binding peptide is linked to the C-terminus of the HSP-binding peptide; and/or
the HSP-binding peptide is linked to the MHC-binding peptide via a chemical or peptide linker, optionally wherein the peptide linker comprises the amino acid sequence FR or the amino acid sequence of SEQ ID NO: 43.

42.-47. (canceled)

48. The antigenic polypeptide of claim 41, wherein the N-terminus of the MHC-binding peptide is linked to the C-terminus of:
(a) the amino acid sequence of X₁X₂X₃X₄X₅X₆X₇FFRK (SEQ ID NO: 68), wherein X₁ is omitted, N, F, or Q; X₂ is W, L, or F; X₃ is L or I; X₄ is R, L, or K; X₅ is L, W, or I; X₆ is T, L, F, K, R, or W; and X₇ is W, G, K, or F;
(b) the amino acid sequence of X₁LX₂LTX₃FFRK (SEQ ID NO: 69), wherein X₁ is W or F; X₂ is R or K; and X₃ is W, F, or G;
(c) the amino acid sequence of NX₁LX₂LTX₃FFRK (SEQ ID NO: 70), wherein X₁ is W or F; X₂ is R or K; and X₃ is W, F, or G;
(d) the amino acid sequence of WLX₁LTX₂FFRK (SEQ ID NO: 71), wherein X₁ is R or K; and X₂ is W or G;
(e) the amino acid sequence of NWLX₁LTX₂FFRK (SEQ ID NO: 72), wherein X₁ is R or K; and X₂ is W or G;
(f) the amino acid sequence of NWX₁X₂X₃X₄X₅FFRK (SEQ ID NO: 73), wherein X₁ is L or I; X₂ is L, R, or K; X₃ is L or I; X₄ is T, L, F, K, R, or W; and X₅ is W or K; or
(g) an amino acid sequence selected from the group consisting of SEQ ID NOs: 74-97.

49.-72. (canceled)

73. The isolated polypeptide of claim 41, wherein the C-terminus of the MHC-binding peptide is linked to the N-terminus of:
(a) the amino acid sequence of FFRKX₁X₂X₃X₄X₅X₆X₇ (SEQ ID NO: 44), wherein X₁ is omitted, N, F, or Q; X₂ is W, L, or F; X₃ is L or I; X₄ is R, L, or K; X₅ is L, W, or I; X₆ is T, L, F, K, R, or W; and X₇ is W, G, K, or F;
(b) the amino acid sequence of FFRKX₁LX₂LTX₃ (SEQ ID NO: 45), wherein X₁ is W or F; X₂ is R or K; and X₃ is W, F, or G;
(c) the amino acid sequence of FFRKNX₁LX₂LTX₃ (SEQ ID NO: 46), wherein X₁ is W or F; X₂ is R or K; and X₃ is W, F, or G;
(d) the amino acid sequence of FFRKWLX₁LTX₂ (SEQ ID NO: 47), wherein X₁ is R or K; and X₂ is W or G;
(e) the amino acid sequence of FFRKNWLX₁LTX₂ (SEQ ID NO: 48), wherein X₁ is R or K; and X₂ is W or G;
(f) the amino acid sequence of FFRKNWX₁X₂X₃X₄X₅ (SEQ ID NO: 49), wherein X₁ is L or I; X₂ is L, R, or K; X₃ is L or I; X₄ is T, L, F, K, R, or W; and X₅ is W or K; or
(g) an amino acid sequence selected from the group consisting of SEQ ID NOs: 50-67.

74.-91. (canceled)

92. The antigenic polypeptide of claim 1, comprising an amino acid sequence selected from the group consisting of SEQ NOs: 3001-8806, 8809, and 8810.

93. The antigenic polypeptide of claim 1, wherein the antigenic polypeptide is 15 to 100 amino acids in length, optionally 15, 16, 17, 18, 19, 20, 21, 22, 23, 24, 25, 26, 27, 28, 29, 30, 31, 32, 33, 34, 35, 36, 37, 38, 39, 40, 41, 42, 43, 44, 45, 46, 47, 48, 49, 50, 51, 52, 53, 54, 55, 56, 57, 58, 59, 60, 61, 62, 63, 64, 65, 66, 67, 68, 69, 70, 71, 72, 73, 74, 75, 76, 77, 78, 79, 80, 81, 82, 83, 84, 85, 86, 87, 88, 89, 90, 91, 92, 93, 94, 95, 96, 97, 98, 99, or 100 amino acids in length.

94. (canceled)

95. The antigenic polypeptide of claim 1, wherein the antigenic polypeptide is:
chemically synthesized; and/or
comprises a phosphopeptide selected from the group consisting of SEQ ID NOs: 98-3000 and 8808, wherein a phosphorylated amino acid residue of the phosphopeptide is replaced by a non-hydrolyzable mimetic of the phosphorylated amino acid residue.

96. (canceled)

97. A composition comprising at least one of the antigenic polypeptides of claim 1, optionally wherein
the composition comprises 2, 3, 4, 5, 6, 7, 8, 9, 10, 11, 12, 13, 14, 15, 16, 17, 18, 19, 20, 21, 22, 23, 24, 25, 26, 27, 28, 29, 30, 31, 32, 33, 34, 35, 36, 37, 38, 39, 40, 41, 42, 43, 44, 45, 46, 47, 48, 49, or 50 different antigenic polypeptides, and/or
the composition comprises an adjuvant, optionally wherein the adjuvant comprises a saponin or an immunostimulatory nucleic acid, optionally wherein the adjuvant comprises QS-21, a TLR agonist, a TLR4 agonist, a TLR5 agonist, a TLR7 agonist, a TLR8 agonist, and/or a TLR9 agonist.

98. A composition comprising a complex of the antigenic polypeptide of claim 1 and a purified stress protein, optionally wherein:
the stress protein is selected from the group consisting of Hsc70, Hsp70, Hsp90, Hsp110, Grp170, Gp96, Calreticulin, and a mutant or fusion protein thereof, optionally wherein the Hsc70 comprises a human Hsc70, optionally wherein the Hsc70 comprises the amino acid sequence of SEQ ID NO: 8807;
the stress protein is a recombinant protein; and/or
each of the different polypeptides comprise the same HSP-binding peptide and a different WIC-binding peptide.

99.-115. (canceled)

116. A method of inducing a cellular immune response to an antigenic polypeptide in a subject, the method comprising administering to the subject an effective amount of an antigenic polypeptide of claim 1.

117. (canceled)

118. A method of treating a disease in a subject, the method comprising administering to the subject an effective amount of an antigenic polypeptide of claim 1.

119.-128. (canceled)

129. A kit comprising a first container containing an antigenic polypeptide of claim 1 and a second container containing a purified stress protein capable of binding to the antigenic polypeptide, optionally wherein the kit comprises a third container containing an adjuvant.

130.-142. (canceled)

143. A method of making a vaccine, the method comprising mixing one or more antigenic polypeptides of claim 1 with a purified stress protein under suitable conditions such that the purified stress protein binds to at least one of the polypeptides.

144.-150. (canceled)
